United States Patent Application Publication US 2026/0344675 A1, published November 5, 2026 (application 19/107,351).

The application's sequence listing, which the Patent Office published only in electronic form, follows.

SEQUENCE LISTING (70 sequences)

SEQ ID NO: 1 - DNA, 1740434 bp, Paenibacillus xylanexedens
  source 1..1740434: mol_type = genomic DNA
gggtatataaatgtctagacgtcatctcaaattgttatggagggaatgtaatggcttcgtttgtattattgttgaaagattatgaagatgaggaaaaggttatttatcattttgggccgaatgaacaaattatgggaaagatagagctaaataaaaagaatgaaacgatacaagaagtgacgcatgtagtaaatgccaataacgagtcgaaattttattttgatagagcggctcagagattggcaatgtgtctgaatcgtgaaaatggacaatttccaaatcaacaacatttgaatcgtaagaacaacgcaacctcgattggttatcccactttcgagggtttttttgatttaagtatatacgtctaaaagtctaattagttattaagtttattgatatgtaatgtattttaaacagatcatgctacgctccaagcttttcaaaagtatcagggatcatttagacacatcagggacggtagaagatacaagagttaaagaacgagttatttagtgtccttaaaaaactggtgcagttatgaacgtgaccaacatagaagaatgttaaaacaattaaatttacatcatcagatgagcagaaaacgtataagtacaatcccaaaggaggtattaagtaatttaaaagtgctaccgagtatcctaaattaaatatgaagttatctgaaatttgactttacaaaaagagagtggaaggctacatcggctaattaatgattcaaaattgaatctagtcaactcataaactaacatgagtaagtacaggcatatcattgaactttaccaagcctaaccttaacgtctcaaaaatgggaatctttacaggaaggtgttttgtgaattaaaatacgaaaagtaggattagattttcttcatttgaatcacagtttattacagtatgagttgatgaaatgatcatcagtgcattgtaagctttcatatttttgctggcagttgagcctcattcatgaccatacataacgacaatatgaaatatatctaaggaggagaaccataatggaagtcgcacgtcagtttgacttaaatattgaaaaagtacttgaacattggacccctgcctacgctttacgagaactaattgctaatgccttcgatgaatatttactatcagagacgtctgtaccaaagatttacaaggatgagcagggagcatggcatattcgtgattttggccgtggtttgcgatatgagcactttacacaaaacgaaaataaggaaaagttaaataatcctgagatggttattggaaaatttggcgtaggattgaaggatgcaatggctacgtttgaccgtcaaaatatccaaatcttgattcgttctcgtcatgcagatatcactatggacaagagcaataagcatggatttgatgatatcgttaccctgcatgctgtaattcagtcaccatctgatcctacccttgttggaactgatgtaattttatatggagtcaacgatgaggacatggaacaagccaaagatttctttctacatttttcaggggatgaaatattagaaaaaacgtcttacggttcggttttaaaaccaaagaaagagaataaagcaagaatttatgtgaacgggctgtgtgtagccgaagaagaaaatttcttgtttagctataatattacctctaccaatgcggcgctacgcaaagctctcaaccgggagcgcacgaacgtcgggcgcagtgcttatacagatagagtgaaatctatactgcttgcatgtactgattcagtcgttgctaatgaaatggctgcggatctgaaaaattacgaaacaggttatattcatgacgaactccagtggacagatgtccaactccatgcatgtaaaattttaaatgctaacgaaaatgtaatttttctcacgcctgaccaaatgaggaatggtggttctttagtcactcatgcccaggatgatggttaccgagttgtggtcgtcccagagtccattgcttatagacttacaaaactccaagacatagaggggagtcctatccgagatttagaaggttatcgagaagagtttaatacaagttttcattttacttacatacctgtctctagtttgtcaaaagaggaacaaaaggtttttgctgtaaaagatttaatcttaaattggctacccagtagtcagacaaaaaacataaaagaaattagaatctcggagacgatgcgggtcgattattctggttttgaagcacttggattgtgggaacctttagaaaagaggattacgatcaaacggagccaattacgtaatgtaatcgatttttcaggcactctgttacatgaaatagcccatgcgtatactggtgcagatgatgaatctttagagtttgagaacggattaactcaaatgcttggtcaactaacatcctatgctattaaaaatgaatcaccaaagaaatttttaggtttatttaagttgtaaaacggatatcatttagggttataattgaattgaagatatttgtcttgttacacaatgttacttgcacctacaattacgactatgtggcccagcttatgctgggtctaattttatgtaacttgacgagtcaccgtcttcagctgtcaacgctgttgtcagtgtactacttctgattacctgtcaattttctgttcctttgctgtttgttcagttttcttgtgtaatataataccatattgatattatttctgttttaaggaagtgaaaacattgaaagatcagttagtgcatatgcgtgacaagctaaacaatatcaataaacgtaatcgctctattcgattattaaagatttatcaaaaatggagctttgacctttctatgatagatattgtggaaacaaagcaagaaacggaatcaattctaaagggaattttagaacagaggatcaaagaaaaaatcaccttactgaaaccatcaattgataatgaaaaatcaataagtttatccaaaaagcttacagacctttatcgtcaaattaaagcgacagaagatgaatcaggtgtccacgatttatacttaggctatccatttttatcaggaactctttttgatggtacctttattcaagcccctctttttttatttccaatccgattagagaaagacaacacaaaactacaaaaatgggtgatacaactcgaagaaggtggcccacagctcaatagaacgcttttcctggccttaaagaaattaaatcaacttaatttcccagaagagatttttgaagaggctgtctcagttgcaggttctatggattttaaagaagttatcgatttcttaggaaagcaacagctaaaggtcgaatatacagaaacggggctaagtcgcttaaaagagtacatgtctaatgacattccagaagtagcaaatatgacattgctggaaaatgcagtgataggggattttccgcaaggagggtcagccattgttcgtgattttgatgaattaattcatttaaatgagaccagctctcttgcattagtgggagaaatgattgattttaataataattctttaagggatgaagggttactggctaatccagtgaaacttgatgagcgagttgatattaaaggtgacattttaaatgtattgcaaagtgatggttcgcaagaggaaattattcgagaagcccgttttcaaaaaggtctagtcgtccacggacctccaggaacgggtaaatcccaagttattgtaaatttaattacggatgctctacataggaagaaaaaagttcttgtagtctgtcaaaaacgagctgcattagatgtagtttatcaacggatgaatacactgggtttaagtgatcatattgctctggtgcacgatgaaaatattgatcgaaaatcgctttataaaaagataacgacagtattagagcataacgatttgcaatttgctgaagctgtagaagaattaataaacgttacctccaggctgaatgagcaagaaaaattacttaatacaatcgcaaaagcactttacgaaaagcaaccgtttggttacagattgtatgaactttatggcctatccaatcctattatcgatttgaacaaaatcatttcgctgcaaagtgtttctgatcagttggcgaaggattcttttcctaaaatgacggaggctatattcacctatggagaatggtatgagttgtatggaaaagaacattatccgcttcgtgatcgtaaaagttttgctgactttgatataaaaaagaaactggacacgattaaaaaattggaagatttaatcgacaaagccaaaatagccatagctattatcgaaaagctaggtctgataaagttcactcctgcttatgcttgggaagtacaacaaaagataaacaaaatatacccagaacttgatggagaccaaaagcgttcgtttctagggctacgcttattctggtggaccaggattacaggcaagtccattattgatcagattctgaatggagaggtgttcaaagggacgaattcaagcgagtgggtaaagattaaaaagattttgaagaacacgcacgatttaggcaaattaaccatgacactaacagaagaattgaatgcattacgttctatagttaaggaagaacatgtagtcagattacaggagcgagtagcggacggcgatatccctttagaagaattaatcttgtttttagaatatttccagcaagattttgatgatttgaaatcaatggatacgttctggaagcagtccagtagtgaaataaaaagtgttattttagcgttgcaggaaaaagaagtcgattatgaacagtcgctcaataagttttgggtggaaatttttaaaaattcagcatatgtacactggattgatcaaattgaagcgaaatatcccgatgttcaaaagatttctacaaatgaatttaagagaatacgccaatcatttgcacagttattggaagagaaacggaaagtatccgcaaaatatttaattaacgaattaaaaaatcatgtgaatcttttacagcttaataaaggacaatttacaaaagagttaaaacatcaaacgggtaaaaagagattaatttggcctcttcgtaagttagtaaaccaatttagcgataacgtattagcagatattttacccgtttggctggcttcgccagatgtggtgtcttctatttttcctcttcaagagggaatgtttgatatcgttatctttgacgaagcttcgcaattaaccgttgaaagtagtatgccttctgtataccgtggtaagcaaatcattgtagctggggatgaaaagcaacttcaaccatctaatttgtttagatccggctatgcagatgacgaagaagatgacgaagcaaagtatgatgtcgacgagtctgtaagcttactcaatctagcgaaaagacgctttccagaaaaaattttacagtggcattatcgttcaaaatatgaagaactaattaacttctctaaccatgctttttataatgggtatgtccaaattgcgccaaacgttactccgtttaagaaacctcctgcaattgtctggaagaaggtaaacggcagatggttgaaccaatcgaacgaggtcgaagccttggaagttgttatgcagttgaaaaagatattaatcgaacaagatcaaaaatcggttggtattattactttcaacgcgaaacaacagtctaaaattcttgacgtgattgataaaacagtattagaagacgaagagttcagggtactttacacagaacaaatggctcgtgacttagatgaaaggctctttgtcaaaaatattgagaatgtccaaggagacgagcgagatatcatcattttctctatcgcatacgctaaaaatgaagatggtaaagtgcataaccgttttggaacactcaatcaaaagaatggtgaaaatcgacttaatgtggcgattacacgtgctaaggaaagtataacagtggtttccagcattgagcctgaggatttaaatgtagccaatgcctctgaaccaggtcctaggctattcaaaagttacctaaaatatgctagagccgtgtctggaaataaaaatgaagatatcaaatcagtgatccaagagatcaatgaaacaataagcacgcagacagttcaacaatccgtgcaattcgattctccatttgaagaacaagtgtatcagcaactccgtaacttgggatatgtactgaccacacaggtaggtatgtcgggatatcgaattgatatggcagttgtccatccaaatgattcttccaggtatattctaggtatagaatgtgatggggctatgtatcacagttcgccaagtgctagagaacgtgatgtttacagacaaagatatctggaatcaagaggctggatcattgagcgaatctggagcagaaactggtggaagaatcctgtgaatgaaatagagaaaatagatcaacgaattaaagaattagttcgaaagggagagagcaatttctaataagagcttagtttttcttctgaatgaactaaagactgatttagcggatttcccgctaaatccccatctcacctcatcccttgagttacaatcttcctgaggtgaccttaccatgaaggataacatgtcaaacctgatcgaagatttgtttcacgggaacctgcggttggacgagtcgattcatcctgagcaagaagagtatcaggagatcaatcgccagatatcggacctgatgcaggactacaaaacacagcttaccgagaacgaatacgatgctctggaacaactgatagacttaatcggacaatccacatctatgtatgtggaagcagcgtttgagcaaggttttcgcacaggcggcagactgatgattgaggttttagctaaaccttgagtatttacctacttcataagccaggggcagacaatacacagcaattcaaaaatcccctcctccattaccaccgattaggctggcattggggggaggggattttgtttttaaattattcctttatctaaataactacaacctaccgcgccccaatatttttacccgctggcgtacccgagccgatcagatcactgccacccgcaagctttaggaaattgcccaggacaggtgttccgtccgcgctacgtgttaccgaaggcacgagggagacaaagtcggctgcgctggcgagcaggcctttggcgttctcactttttttgttcttccaccagacgttggtgctgctgacgtcggttccgcttgttttgtcactggcgccgccttggaaggacaggttgttggtgaagatgtgggtgcctacatcaaaggcaaagttgctttgcccattgttccaggaggtgttatttttcatctggatggaaccgggattactgttgtaagtgaagccgtgctttttattattaaacgcaatgctgttctcaacgatatgattcactgcaatcttctcgccgccgagcttgaacccgttgccatcgctgttggaggtggaggtgccgtctgatgttgcaccgttagcataggcgatgctgttacggatcgtgactgcgccgatggcgcctgtgtccgttttgctatacagatcccagccatcgtccacgttataggccgcaatacaaccgtcgaagacattgcccgggcctacggtcagtttggccgcaaaaccgtctgcatcctcgccgtcatcggggtcatagttgttgtgggagtaagaacgaatcacttcattatatgcaggccattcactcttggcggctgtggaagcataacgccccatttgaatacccgtatcccggttgtgatgagcctcgatctgctccaggcggttgtagctgcccccgatgaagatgccgttgtcgccagcacccttcacctcaagccctttgacgaaccagtagtctccgaacatttgcagcccgcggttggtggaagcgaaggcttgggctgagaaatcaaagaccggtttctccgctccatacgccaccaggtttttacgttggctcgatgtgccgctgttgccacgttcaatggtaatagtctgagaaaagctgtagttgccgccgcgcagatagatggtcttgcctggggcgatctgggttaatgcgttagcgagtgacgtagggctgttcagtgttcccggattgctggctgaaccgccaggagacacatagagatcacccgcagcaagcgcgatattcgaagtcgccaccgattcagagggattttgcaaattgctctcgatcagctcttcagcaccagccgatccaccaccaatcaataatagagggaacgcggcactcagacagatctgggccattttcgatttcagagaacgttcggatcgtacagatacatgggtggatgtagatgggaataatttcattacgcaaacctccttggttaattgggaatagaatgaagagcatgtggtatccgtgtaccagaccgttacctatgagatagatcatgccggctggttagatgtaatctctaggacacagctttatggtaaatgttgtaagcgttatcatcaataatcatctgatcagatggaggtacatgcaggcaggtcaggcctgcaagcttccaatgcttgtaatatcacgtgaattatgtaatctttccattgggtgatagctctcatttaacgaagaatcatctgaaatgaacgtagagaagtacgcttttccatcctcagagtaccagttttacttatgatccactcctatgaacttcattcaacctaaaataaatagcagcctacatcctgaagtgaagattatactcaaactagtcatgaaaaagccctgatagcagctgcaattggcaacttgacgatcagggctatgtttaatccagaacgtaatctccttactcaaaatacccaaatgtaccaacagtgtcagactcagcgatccaaacgctgtccatccaccttaatatccgtccgtctcacgactctgtttcttcgcttgctccacgcttggttcatgtttcggttggaccgtcgcactatcatcggttggtacagaggttaacccttcagagacgcgccgaccgtaatccgcatccgcttgggtgaagtaagagatcatgcgctcccggatatccggtttgcattgtgccaacgcgccgaccatgttgctgattagctcatcccgctcccaatcttcgaacgcccgatacgtatcacccgcttgtccaaagtcattggtgcgctcaatcttctcgcggacaagtcggccttccaccagtggttcatgttccttaccacgtgggggtgcttcttttaacccaccgagcgatgaaggctcatagttcacatgcggattctgccccggtgcacgatcgacttgatactgcatctgcccgccgctctgattggttgccacccggtttttcggcgcattcacaggcagttgcagataattcgcacccacccggtgacgctgggtatctgaataagagaaggtgcgtccctgcagcaacttgtcatctgagaaatccagcccgtctaccaatacacctgtgccaaacgctgcttgctccacttcattgaaataatcttcgggattacgattcaacgtcattttgcccacaggtagaaaagggaactgatcctgcggccacagcttggttgggtccagcgggtcgaaatccaactccgtatgctcgccgtcttccatcacttgaacgcacagctcccattcgggatactcccctttttcaatggcgtgatacagatccaatgtcgcatgattgaaattctgtccctgaatctcgctcgcgtctttttgcagcaggttgcgtatcccttgattgagcggttcccagtggtatttgatgagtacgcccgtgccttcctgattgacccatttatatgtattgacgcccgagccttgcatctgccgataattcgctggaatgccccatggagagaagaggaatgtcaccatgtgggtagcttcagggcttagtgatacaaaatcgaaaaaccgctccatatcctgtgcattggtcaacgggtctggcttgaaggcgtgtaccatatccgggaatttaagcgggtcacgaatgaaaaagattttcagattgttacccaccagatcccagttgccatcctcggtatagaattttacagcaaatccgcgcgggtcccgcagggtctccggtgaatgtccaccatgtataacggtagagaagcgaacgaacacgggcgttagtttgcctttttcctgaaatagacgtgcacgtgtgtacttcgataccggttcatccccggccgttccatacgcttcaaatacgccatgagcaccagcaccacgggcatggaccacacgttccggaatacgttcacggtcgaagtgagtaattttttcgagaaaatgatagttctccagcgtagtcggtccccggctgccaacggttcgtacattctgattgtccgtaatgggatgaccttgtcgatccgttaatgtctcagggtctttgtctgaggaatgctctgattgtgaagactgatgattcatggagtggagcaccgcctttccttaaagtggattcctgtatatattttccctgaaaattggttctatacattaaacctcgcaaataatctcgtaaaaaaagcttgtcacccgcttcatcgcgtgagataattaacttttgccctgcggccttttttgaacggaaaaatgaaagaggaccgcgtctaagaatggaggctgacctaggattgtctacacaacgttatccttttgcatatgatccggctgaaccttttgtatcccgtctgggagaatgggtcgccgatgttttttacgatattttgccagagttcggcttcgaggtacgggatgaacagatttttatggcgtaccagcttgaacgggcctatggagataaaaagaccattatggcggaggccggtgtcggaacaggcaagacgttagtctatctgctctacgcggtctgttatgcacgttatacgggcaaaccggcggtgattgcttgtgccgatgagtccttgattgaacagcttgtgaagcccggcggagatattgcgaagctggctgcacatctggacttggaagtggacgcacgtctgggcaaatcaccggaccaatacgtctgtctgaacaaactaagtgcgatgcgatttgcggatgaggatgcgcctgttattgaagaagtgcatgagagcctgccggattttgtgaatacgccgggtacacttcaggccttccatccgtatggtgaccgtaaacagtatccacatctgaatgatcgtcagtggaacaaaatcaactgggacccgtttcaggattgttttgtttgtccaaaacgtcaacgttgcggcctcacgctgtcgcgtgaccattaccgtcgttccaaagacatcatcatctgttcccatgattactacatggagcatgtgtggacctatgatgcgcgcaaacgcgagggacaattgcccttgctgcctgaccacagctcagttgtatttgatgaaggacatttgctggaagaagcagccctgaacgcactgagctacaagctgaaacaccgcatctttgaggaactcgtcactcgcctgttagaaggagagattcgtgaatccctcgcggagtgtgtggatgaagcgattgagagcagtgagcgactgtttgcattgctggatacgtatacggtcgcgatccctggttcggaacggaaagaagttcgggtagagccgccactgctacgtgagattgaacgtctgacgagtgtgctggatgcaatcggcgaagaattggtatttgagagcggattgttctcgctggatggttaccagatgcgtgtcgtggaagaacatctcgatatgattcagtctgcgcttgctttgttccgtaaggaagatggttacatctgttgggcggaagagagcgaggatgagacgaccttatcgatcatgccgcgtactgtgaaggaaatgctgaacgagcgtgtgttcaacacaggtattccaatcgtgttctcctctgcgacgttatctgtggacagttcattccgttatgtggcggacagcctgggcattgatgattttgtatcattctcagtggcttccccgtatgattatgcggacaaaatgaagatgaaaattaccgatgaagctataccgggtcacccggagaacgaaaatcgcatgcgtgatgcggtgtcgttacttcaggagagcgggggacgtgcgctggttctgttccgtacgatggaagagctacgtgcattcaagcaggacatcgttcatgtacctgaagcagaaggtttgcgctttatgtatgagggcgaccgggagatcagtgatctgatcgcggcattccagcaggatgaggagagtgtgttgtgctccgttaatctgtgggaaggactggacgttccaggtccgtcattatccaatgtcatgatctggtcgcttccgtatccaccacaggaccctgtcttcaatgcaaaacgcagtgcgtcggctgcaccatacgaagagatcgatcttccgtatatgctcttgcgtgtgaagcaaggtctcggacgtctgattcggacaagcacagattctggttccgcggtcattctcgatgaatcgctgtataccaaaaaggaagccaaagaccgcattgcggccctgcttcctgaaggtgtggaatggacaaccctgacacactaaccagcttacgttaaatgttcttgctttattttcgatgataaggtttcttgccaaaataagttcttgttctctgcggattcaccatccgtatgtgagcaagagcttattttttgttttgatggttccttcaatgtacttctcttccctttttttcgaggggttttccctcgctcctcgctaccaatcgctccaacattctaacgtaccgcaccttattagggtgataatgaagagatgtaaattctaacgaatctcagtaacgttatcccgccgaaaatagctcttaagcctgtaaatcgaccgaatttggagaaataacgtcgctgtgattcgttacacgtcagacctgcgcaaataggagcgaatagcgtgtgtcaggttcattagaaccaatgaccaatgagcgctaataagggagggcctctgtcatgctcatgacttatgggagatggaagcccctttttgatgtgtatagatttttgctgtgttaaaaaatacccatgctcagataccgttccccggtatccggcgcaatgcagagcacccggtgccccggccccagttccttcgcgatacgaagggaggcccacaccgaagcccccgaggaagggccgagcaacagcccttcccgggcagcaagctgccgcatcgtatccagtgcgtcctcatcggacacctggatgatggcatcccatacgtcggtattcaggatgtccggaatgaaccccggacttgtaccgacgagtttgtgtggtccgggctcgccaccggacaacaccggagaacctttgggctccaccgcatagatgcggatatcgggtaactgcttacgcagttcttccccggtgccggtaatggttccgcctgttcccgccgtagcgatgaaagcatccagcctgccttccatctgctgcataatctcgggagccgtcgtgatccgatgaatgtccgggttcgcctgattttcgaattgctgcggaatgaaacttcctgcaatgtctgcctgaagttctttcgctttgcgaatcgcaccaggcatccgctccgcagcaggggtgagcaccacatctgcgccataggctttcagaatgttgatgcgttccttggacatattgtccggcatgatcagaatggctttatatcctttggcggcggcgttcatagccagaccgatgccggtattgccgctcgttggttcgataatggtggcaccagggagcaagtgtcccgcacgttcagcctgaacgatcaggttataggcggcacggtctttgacgctgccactcgggttgaagtattcaagtttcacgtatacatcagcggagtcgctgcctgtgagtcggttcagtttaacggcaggtgtctggccgatcagttcggttacatctgcggcaatgcctgtatgtgcgggtgtttgtttaatcgaatgggtattcaaatccatgaagtacagctccttgattgataagacgttgagagtatatccggttgaaatcaattcatgccttattggaatggttggatatctcttctccatcttaatgaacgtaaccttctgtggtcaacttgttttgctggggatgggttcaatattgttagagttgtatcaagtctgcgccaagtccatctgcagatgccgactgagttcttttttgacttcattgcgtgcgaatctccacagcatatagaaccgttgccaataccctctgcacatatacagagtttcgataccctcggcttcccgtttctcttccagtactttgacaccgcgggttctcatctgtttacgaagggccaacatctccttgagcacattgttctgaatgcgggtcagcgacagaatgtagacttcgggcatcttcagcagcagcgtatccagtgtgcgaatatctcgttcaagtacatccagcaaaagcgtgcgcacaaccagacctttaatcagacgatggtcttcatccgcaggggatggggcagaagttgaggatgtcatatgttcacttccttaacctttaattggaattttatgtttacagaacatgtgttcctatattataatcaatatatgtaatcgggatacacaatacaaccgagaaatattggaagcaaacattatcgcattttcctaaaggtacagatagtgagtgaggccagggatttagggacaagcctgctccaaaataaggtataatttatgggttttgcaggaaacctaaggccataaaccaaataagccttttgcaatgcagtctgctacagaagtaattacaagcaatgaattactgccatgaatggcgatcatgattcaaggatgtcttgccttgacacgatggcaccaggtcaacgagtagaagcagttttattttagcgaaaataagcaacaaaaaagcccctgccttgggcggcggggcctatggaatactgccgattcagcggcaggtttgatgatgtgttcaggaattaagcaagatattgaggtttttcgtagaacgcctctttttcaaggatgaccttataaggtctttccttgcccttcagggagggcccaatggtcgttagcggtacggccggcttgtggaaacgatcttcttccttgggttccggaaccggtcgtgatgattcgggcgcagaactgaggcgtacctttttttcgctgccccagcgcttgcttatttttttcgtttccggtttcattccggttcgcctcctaacaaatcgttgatggcgttgaacagttgacgattctgtaggtcaatctgctgaaataccgcctcatccgcttcaatatgtccaataatgtgaacggtgataacatacctcttggctacaggatagcatagcagatactctttctcaaggtaatcatcatacaggttgatcttgattttattctcccggtaagaatcaataaccaggatgcgcttgggatcatccggttgtttgtcgtcgttagcggacaagtcatactttctccccggttctccaacattaccacataattgctcaatataaccactgtcatctgtacggtatatggctgtgccacgtacagcgaatggaggatgagagacaaaggcagtacgcagggcatcgctcattcgctccagcatcttggcatctgctttgcgggtacgcagcaattccctaaagaaccgcagcaacttaagcagttgtaaccttgcttctccctcagcacgtttatgcttctcaatgatgttctccaattctggatcactccagcgtccttgttcctcaatactgtctgcgattttggaacatgccacggacacggctggtgcccactttccgtcagaacggatttcatatacgagtggatttaatcccagcagatctgtgggcatacgcaatccttcaaccttagttgtgtccttgatgtctgtaatatcctcaggaagaatgaaaaaaatacgttttcgtcccagacgccccataaacagacccatttccagcattgtattatcccggaccgacgcgtagtacttcccgcggattttggatatatcatccggatgaaaaataaaaatggcaaagtcagtcgtacggacctctacttccagatcgtccatggtatagctgcttggattaaaaaccccggaataccaaggggtaacttcggctgaaaaacgtaagttttcgtgtactgcggctgcaatcggcttcgcttccagcgagcagccaataaagactcttggctttaacgttttcatcaatccgcctcgcttaaacggtagtgggattcaattgttatattataccataaacagcagagtaagtctggaaacgtctgaactggacaaagaataagccgattacgtttgctatagtgtatgtgtgaaaggaaaatgattcctttaaaaagcgcaagaaaataaaaaaaggccccaatttgtcacagttgggtgactgacagttatttttggaagctttggtcatagaataaaggagcaggttgcaccattagcaagcattgcttatcctggtgttgccgtatgactgctggtgcagtccaaaggctgctttatgcctgtttttgaggggtctgctgtttagacccggtcacgttggtgttatataatagaagaacaagcaagttagctttggtgtttaaactgaataaacttgcaactgctgtaagttggatttacaatttacacaggaacgaagagtgcagaacccatctgtagaagcgaagcgttcgcctgaaagctttttgaatgaaggcagcttcggaagcataagcgatcaccggattttccccagagggaaaatggaattccaaaaatccggggataaccgcgatcacaagagggtactgtaatccaagtgtaaatgtacaattaaatgttcaagcttatgcattgtagttatttttcagtttaactgagcacagctaaccacaacagaacagaaaggatcaggataccatgagttcccgaaggacaatctccccaaggacgatctggaaacgttacgatctctcatacacatagcgccccttgtagagtacaccaaccggtttcaaaaaaacggctgactctgcgaaagaggggattggaatgaatattcgaaggacgtacacgatgatttcttccaggcttaccttttgcagggtacggtcggtataaaaaaccaacctacaaactgcgagggaacctgaatgaagagaacatcgttaaccttacaacacgttaaaacagaggcgatcaaattcgccattatgctactcggtacatttattttagcttttgcttattatcacattaactttcagaatcatttatcggagggcggatttgttggtctggccctgctcggaaaatacgcaacaggcttatcacctgctatcggtatgttgttactggacattccggtcatgatcctggcttggttcctcaaaggctggaaattcatgattcaggcattgcttggcgtcggtgcattttccctattctatgacggctttgaacgatactctacactggtattgtcgtttaacggaaatctgtggattccggcagttctatccggtatattgacaggggtaggcgctgggatcgtgcttcgattcggtggagcgacaggcggagacgatattctcgccgtgctggttagccgctggaagggatggaagctgggaacagttttctttgtcagcgatgcttttgtattgggattgtcgcttttctttcttccggtaaaagaaactttatatacgattctggccgtatggattgccagcaaagtcatcacgtacgtcgttagtgttccggctcgcggaaccgtggttacaacttcggctgtgaaattgccgataccatcggctgcggccaaagcagttaacgctgctgctatttcacaacggactacggtggctagaggggtatccaattaaccatacgttcagaacaaccataacctgtatgcatcatattcaggtcttgatagttaaagttcataccaaatcccttttgactgctcttcagcagcaaaagggattttgttgtttttgctcatggaatgattttatattcgctgaactgcggaatgatagcccactgtgaaaacagccattttccgatatcatccgattcattcagggtttgatcgaagaagcaatctgaccatcctgattatggataatcgctcgaatattttgtttgctgctcagttctttggccttatctacagcttctggcttagtatcgaatgtcgacagataggtagactttccttcttccttgatcgcccaaccggagtcggtaggcacgacatggatgttgtcatgacttttggacgaagaaacgggctcggaatgacgacgatccgtggaagacgacttctcaggattggaattatcggaagaagatgcggagtctgatttcgaactttccggtgcgggatgattttcatcccattcttctgccttagctgtcgctatggcaatcgagcgtccttcctcatacccgtcatcgagcagagcattggcaatctcaattgctttatgtctgacacgtggttccagattcttcatggataccggataatcctgtttgttccaaggcatatgaacccctcctgtacaataatgggttagttgtatattaccctgtgaggagagggataaacgatgaacatcagaggtcgtaagtgcatttaccgatgatctatataaattgaaataaacatttacacgaaacggagaggacagaaaaaacctgaagaaacgaagtgttcgcctttatccccggatttatccctttataaaaggaatcaaaaaaatctggggataacagcgatcggaaggttgttctgtcatcggagtgtccagtgtaaatattctttagttcaacttatatagaaggatctcgttcctatacttttgcaagccagaggagtataatgctgtccatgaaagaaataagttcaacaaaaggaagataaaggagtacatacatatgtttagtcttagcctggcaatccctatgctgttcaccatgctgattcatgccgcagacagcttgtcatacgcgctccgccttggtggtttacgcacccgcagaattgcgctggccatttcattggcaggtatcttgctgctcgtctctcgaacctcgaatatggcccagggtccaatggtaggtaatctggtggataccgcaacacgtggagccaatccacactttgcagcacagctacactggttaatgggtgcggcaacgattggaacggcattagccatactatgtttcccaaccatggttaagctgtcttcgagaatggtcgtacattttgaagcagctggttccatccctgcgatggttcgcggtatgctgaagcgaagcaagattagaaatgcaacgtattacatcaccccaccatcctggaaaatggccaaacgattggtacaacatgggatgccaagacggttaatgatgctgaatgtagcggtaaccgcaatctacaccacgggtgtcctgtccagcttgtacgcagcgtatctttacccagcgcaagctgtagctgcatctcaatcaacagggctgattaacggaatagcaacgattttgctgaccatcctgattgatccgcggatttccctgctgagtgacaaatcattacgtggcgagatccgtttggatcgcatgaatcagatttatggctgcatgctcgtgtcccgtttattcggtacactgttggcacagttgttattaattccatttgcgtattggatcggttggatcgtaagtatgatgtgacgacttctttcctgaattgtagccaggcgctctcttgtacatcttttgaaacagcaaatgagagggtgcctgtgcaaattgaattgacggggtatttgtgccgtgatactattagaccgaatagtcggtttattttatggaggtttttccaatcgaagtcaaacgaagaaaagatgttacccagataaaaaaagacattgcacgtaataccaaggaactgtttgcccaaaagggatatagtgcaacttccatggaagacatatgtacgattaacaatcggagtaaaggcagcatctattatcatttcaaaagcaaagaagagttattcatgtatctgatcaagcttaacaatgaagattggatggatgcttggctggacaaagaatccgggtataagactgccatagacaaactgtacggacttgctgaccattacgtggatgatttggctaacccgctgaatcacgccattaacgagtttgtctcaggtcaggtcgtcagtcaggagatgcttgatgagatgctttccctgatccgtattccgtatgcgacatatgagtccattattactaaagggatggaagatggggagttaaaaccggatgacccacaggatgtaatgcacattatctacggtctgtttagcggattgactacactctattatgagaaggacctgacggatattcgtcgtatttaccacaaaggcatggccggtctactggcaggtattcaacaacgttaaccatgaaaagctgatgtaatgtcagtttttctttttaaatattaataaaccggacagtcggtttaaaaaaggagatggaaaatgaacacattgttcagaaacaaagcttttttaatcgtgacagggtctgatttgctgcaaaatctggcgatatggatccggaatatggcgatcctatattatgtgatggatcgaactcagggaagtccaatagccgtctcgctgattaccgtacttgaatatgctccgatttttgttttctccatcataggcggtgcacttgctgatcgctggaatcccaaacgtacgatgatactgggggatattctgagtgcgttgtctattgtcatgattattggcgtcttatcttccgggtattggcagattctatacgtagccacatttgtatcctctatcgttagccagttttctcaaccatcctctctaaagattgtgaggcgaaatgtaaaggaagaacatttgcagtctgcaattgctattacacagagtggtcaatcgttgtttttaattctcggaccaatcgttggaacgtttatatacactgcaatgggaattcaggcatccatgtacgcattactcattttattcctcacctctgcgcttctactcacattgctgcctaaagacgccactcaacgggaaacaaatacctcattattagcggatatcaaagagggctggcaatatgttgctcgatctcgctcgttaaaaatgcttagtctggtattcatctgtatagggctttctgccggtctcatcagcccacttggaatatttctgatcactgaacgtctgggacttgaagcaacgtcgttacagttcctctctggagcgtccggattaggtttattgattggaggaggtattgcggctgctgtaagtggcaagttgaatcagactttaactctaatcgtaggtgtgctgtgtctggctgtagccacgatgggggaagtgttatccagttggttctggctgacccttttgatcagcttcttgagctcaatcagtttggcatttatcaacgtcatcatctccacgtacttggtcactcggatcgatgagcacttgatcgggagagtgaatggcaccatcacacctttattcataggaagtatgcttcttggatcttccatggcaggtgtactgatgaacagcacatccatttttatcgtctacgcaatctcggttaccgtgatgatcatgggtattgttccagcgatgcgaattcaatttcgtaatgatcagacggctcctgccagccaattgaattcggaaatctcttcgagccaaacctaatcaaatacattcttgtgtaacaatagttcgtctatgaaaaaaagaatgtacgacaaaaaagcagcgggatcatcccactgctctttttgtatttgtattataacttattggaaaaggatggcgtactcaccgtatccttctttttgcaagtcttctttgggtacaaaacgaagtgccgcagagttgatgcaataacgcattccacctgcttcggcaggaccatcgttgaacaggtgacccagatgggaatcaccctcacgacttctcacttcggtacgaatcatgaagtggctgagatcggttttttccttcacgttgtggtcacgcaatggacgtgtgaagctcggccagccgcagccggaatcgtatttgtcggtagaactgaacaatggctcgccggatacgatatccacataaatcccgtcaccgtggtgatcccagaattcgttatggaatgcaggctcggtcgcgctgttctgcgtaacttcatattgaagcggcgtcaaacgctcttttagcccgtctttgtccacgttaccggtccagttgcgttcgatgaaatctacacgtccagaacctttgctgtagcgtttgtagtgggcagggttcttccggtgataattttggtgatgttcttccgcttcatagaacggtttggctggcaaaatcggagtgaagattggtttgtcaaaacgtccgctttgtcccagctccgctttggaagcttccgcaatctggcgctgttcttcgctgtgatagaaaatggccgtctgataggaagatccacgatcatggaattgcccgcctgtatccgtaggatcaatctgctgccagaacagttcaaccagtttcttataagggaagatggcagggtcaaacgtaatttgcacagcctctacatgtcctgttgtctccgagcagacctcttcatatgttggattctcggtatgtcctcctgtataacccgatacgatcttgtgaataccgggcagttcttcaaagggggataccatacaccaaaagcatccgcctgcaaaagttgctaactcacttgaatgttgttccatgctatagtcactccatttctgatgaagatttagcgctcgtgttcgagctccagcaatctaccgttttattagaacttgttacacaagcgttaggcttgctcttctattatatcctgaattggcaagccaaccaagcgggattgaaaacaaacaggatctgaatggcttgcgaattccatattcaggctttgttacgtgaccgaaagcgaaataagagcaatacgatagtcatgagcaccagatatccggcaaggatggccaggctcagccagattgaggtttcagcttgtgcacctgcataggcaaatacaaaaatcgctggcattttcccaatggccgtcgcaaccatgaagacccagaatggcgtgtacgttatacctgcgtagatattaacggccatctgaggcacgatcggcaacagtcgcatcgacatgacacccatgaacggatgtgcttccatccatgtggtaaaacggttcagaccccgaatacgttcgaggtacgatctcgcctgatgtctgaagatggttcttgctccgccataaacgagcatggctgcaagtgtggtgccaagccagcatatccaggctgccgtggtggtaccgtaactgtaaccaaaggcgataataacaaacttataaggaatcacaggcacaagagcaaacaatgttgccatggcaagtaacagcggaatggactgatgaagatcggtccaggccagcagttcatatctgtaaataaacgtgactcctgcaagtaaaacatataacagaagccataaccattttcgcaaaatcccaaacgctcctttcagatcaggcaggtctggtcgtgtcccgatctgtactgctgttcctcctaagtttaccacgttcgcccattgtctgaacaattcgtgcgaagtgtgctgcaatcactggcaagttgctgtccgaagggttacactataggacgtggaaatatagaaccgaactgaaggtggaatgatcatcatggaaacaacccaacgtaaacgagttgcaattatcggcctcggcgatattgcacgtaaagtatatttgccgctgttaacagctcatccgaacgtggagattgtaggcattatgaaccgatctccggagccggtcaaagccgttcaggaggcgtatcgattagaacggggaacaacggatctgaaagaactgttgtcctgggacttggatgcggtgtttgtacatacagcaacggaagcgcactttgacattgtcatgcaatgtctggaacagggattagccgtgtacgtagacaaaccgttatcctatacgattcgggagtcggaagagatgactgcttttgccgaggcacaagggctgctactggcagtaggcttcaaccgcagattcgcaccgatgtaccaaaaagcgaaagaatggatgcagggtggaaaaggttttgaatccttgacagtgaccaaacatcgtacaggcattcaggatcgtcctgcggcagaaaccatctatgatgacctcatccatatactggatctgatgttgtggtactcggatcataatgtggagttgcttcatcaatggattcggaagaatgatctggacagactgctgcatgcaaccggaacggccaagctgggcagaacagcctacggtcgattcgatatggtgcgtgaagctggggcagatctggagaaaatcgaattgcatggtggtggacgatctgttgaagtggtgaacatggacacgatcagctgcatgcaacaggggagtctggaaaccaaagaaacgttcgggagctgggacactgtgttagcacgcagaggttttagcggagcagttgataatttcctggcttgtctggactcacctgatgattgcctgatcagtgcaagtcatgtcatggacagtcatgaactggcggaacaattgattcgcaaataattgcagaatacacatacggaggaatacaagtcatggatgaatatgaaaaggaacgtaataaacagatcgaggaagctgttgtagaaacctataaacaggaagaagagatgatgatcctcgtatttgcccagtggtgtgtcaataatggtttggacccggaagagatgtaccggcaagcctacccggatcagcagagcaacgagcgtttgcagcaggtgcagaagctgattgtatccaaggaggaagccggtgagatcccggatgatacagtacttggcgtgttgtcgatgtttggcaatgaagatctggcgatggttgtatccgaggccatagccgcgcgcaaataagttcaacttacgtagactaatatgattacatctgttcccggtgaatgacgcggaattccttcggggacatgccgaaccgggaacggaatacccgatggaaataggtatagttgttaaagccggaagactcagacacttgctccagggtcattggactgaaaataattcgttccctggccatattcagccgtacgtcaagcgtgtattgcatgatgcttttgccaaacgcttctttgaagagatgaacaccccgtgagacactgatgccaatatgtgttgccacatcatcgagcttgaataaagaggaagcgttttcttcaatatagttcttgatctcataagccacataattggtgttggttatcgttggatgctccgcgagcagacgatccacttcgagacataaaattcgcatataataacttgaaatttccggataaggattggagatgcggcgctgctccagtacgagctgtcgaaacaggaccaagaggctttccgtcagttcgactttgatccgggtcggccgtttgtgacgcttccaccactcatccacccaggaaccattaaagaagatgtgatagtcgccactctccaccagtcgttctcccatcggattggtttcattgtctattctcagctcatagggctcgtcaggatcaaaaagaagcagatcgcccgcatctactagggacatgtccccgtctatgcgtgcacggcaacgtccgtctgtttgcagccttaacaggtagttcttcaccccttcaggctgcaccatagcgtagggtttacgatgaaatgaaaagcccgctgtaagaacttggcaggtttgatctgtcggcatgggcatactccttgcaatttgaaaattatgaccagatagttcatgtttcaatcatattattcattttaattgaagctgaaacggaataccatagtattagatttaaggaacaggaaacatccaacaaaacatatgtatctcaaccattcaaacgcagattttcaccatgcgtaaggagatgaacgtcacagtggagaaaatgaaagcaggcatcatcgggtgtggtaacatcagcgccatctacttggaaaatctcaaaaacaacccggtcattgaagtcgtggctgttgcggatttgattcgtgaacgcgctcaggaacgggcagatgaatttaatatcgcaaacgtttacaatgtagatgagttgctgcaaaataacgaaattgaactcgtcttgaaccttacggttcctggcagtcacgccatgaccgatctggctgcactcgaagcaggcaaacatgtgtatgccgagaagccgctggcaatttctcttgaggatggtcgcaaggttgttgagttggctgaggaaaagggattgtatgttggttctgcaccggataccttccttggttcaggcatacagacagctcgtaaagccattgaggatgggctgattggcaagccggttgcagcgacttcattcttcatgggtggaggaccagaagcttggcatcctaatccggagttcttttatgttgcaggtggcggaccgatgtttgatatgggaccttattatctgaccgctctgattacgttgcttggaccgatacgcaggatcagcgcctcggcaggcatacagattgcagatcgcaagattggctccggaccgaaggaaggtacagcgctgcaagtagagacgcctacccacttggcaggaaccattgattttgcagaaggtgccattgcaaccatgatcaccagttttgatattcgcggagcttcggatctgccacgtattgaaatctatggtacagaaggtacgcttagtgtaccagaccccaactattttaacggggaagtgaaggttcgcagatacggtcaagacacttgggagacgatcaaaccagtcttcgagagtggacaaaacgaacgaggcatcggcgtaaccgaaatggttgaatccatccgtgccggacgggaacacaaagccagtggcaagcttgcatatcacgttctggaagccatgcattcattccagcgttcttcacttgaaggcaagcacgtacatctggagagcagctatgattcttttgcagtaactcgcacagttcaaactgagattgaaaccgtggaatcccactagtctgagtaccaagtgttcgaagcttgatgctcttacgagtgaagcaaaataaccagtattcttacgttcaatttcaggatagaaacactctcgattttccacactaatcaaacaggcatgtgatctgaacggtaattgtatacagttcaatattcatgaattcagcaatcatacgatatctattccagggaggaatcgcacttgaaactcggcgtatttttggtactattcggaggacgtaaattggaggatgctcttgattatgtagcatccaagggattaaaagcagtagagatcggaacaggcggacatccaggcaatgcacattgtaagccagatgagttgttaagcaatcctacagcattgaaaaacttcaaaaacgcagtggaatcacgtggtttgacgatcagtgcactcagctgtcacggtaacccgctacatccgcaaaaggatattgccaaaggatttcacgatgattttgttaaaacggtagaactggctgagaagctggaagtacctgtagtgaatacattctccggttgtccgggagaccatgaggatgccaaatatccgaactggcctgttgcaccatggccaaatgacttccaggagatcctgaagtggcagtgggagaacaaagtgatcccttactggacagagtggggtaaatttgcagcagatcgtaacgtaaaagttggattggagctgcacggtggattctccgttcatactccagcaaccctgctgagactgcgtgaagcagcaggtgaagtgatcggagccaatctggacccaagtcacatgtggtggcaaggtattgatccggttcaggccattcacatcttgggacgtgaaggagccatccatcacttccatgcaaaagatacaacgattgatccggtaaacgtgaacaaacacggtgtaacggatatgcaggactataccaatatgctggatcgggcttggcagttccgctcggttggttatggacatgataacaagacttgggcagatattatgagtgccttgcgtctggtcggatatgattatgtagtaagtattgagcacgaagacggtctgatgtcggttgaagaaggattctctaaagccgtgcaaaatctccagcaagtattgatcgaagaaccgctgggcgatatgtggtgggtttagagctacactagggggaaattgaatatgatcaacgtcaccatttggaatgaatttgtccatgagaaaattcacgatgaagtaagggaagtctacccggatggtctgcatcgagcactggctgacggacttggcggcgaaggctttgctattcgtacagctacactggatcagcctgaacacggattgagtgatgaagtgctgaattctacagatgtgctcatatggtggggacatatggcacatgatcgcgtaagcgatgagatctcacagaaggtcgcgcagcgagtgctgaacggcatggggatgattgtgctccattcaggtcatttctccaaaccattcaaagcgctgatgggaacaagctgcgatctgaaatggcgtgtagctgacgagcaggaaattgtatggtgtgttaacccatctcatccgattgcggatggcatcgaaggcaagattgtattggaaaaagaagaaatgtacggtgaatttttcgatattccagtaccggatgaactggtgtttgtaagcaacttccagggtggagaagtattccggagtggatgcacgttccggcgtggtgaaggtaaaatcttttatttccgaccaggtcatgagacgtatccgacctattacaaaccggaaatattaagagtgatcagcaacgctgtgaaatgggcatatcctgcccgcagctttaagccggaatttggcaagagcgaacctgtaagaccatttggtggcgtgctggtctaattcactaactcaatcgtgtaatggaaattataagttttattcaaaaagaacccttctccgagtcattgatgactgtggcagctgggttctttttgggtaagatagtactatggggaagttatacgatatttcccatggtgacgacgtagcgtgtaatgtatactgggatgtatgatccattttggatgatatgcttctaaaatttaaactttttagttgcaggcgttttctttgaagcttaaatatgttattatgaaatatactaacaaaatgtaagttgatttgagtgatctctaaagaggtgattaatgtggaaggtcaagacttgcggatgtgtccgcgttttgagacggcgttttcttttttgggcaagcgctggaatggtttaattattcaaacattgatgagtggttcgaagcgattcaaggatatctccaatctgattccatccatgagtgataagatgttatccgaacggatgaaagatctggagagtgaaggtattctggttcgtcacgtctatcccgagacgccagttcgtattgaatatgaactgacggataaaggtagagcgctccagcctgtcatgaatcaaattcaagactgggctgagcagtgggttgactaacgcataagcaatatcacccacttttgttgtatgaatgacatagactcctgatttctgtggaaatcaggggtttttgtcttaagtactatgttgatcggcgtttttctcttgggctatgcacatgttgtcatgagttgtagtataatctatagaaaatggccacagacggccggagcgaaggaggcccacttgtcatgagagaagaaagcttatcccgtgaagtacgctacggcaaaaaagatattgcagaacttgagagcgcatccattcaggtccatctaatttacaaaaaagctgcagagttgtttaagcgcacagcatattcccgttcggttaaggatgatcttgccgaagtgaatacgcattctgtgaacagcgatggtccgaaattagctccggcggtgctgcaaaaatggattcaaacgtccaggggctggaagtgtatcggatgtgagctgggacaacctgattcaacgatgtctcagatggaagaaactatccgtggtaagcaattggctttagatgtgggagaaggtcggctggttcaggcagaaatgctgattcaggcggttgtctggtcacaatatgagaagattcgaatgtttgcgccatggcttggtgatgaacccttttatagcgtgcaggagctggatgtcattgcccgttatattgtgcctacctatttctcggaacggcctttgcatgagcaaggcaagctatttaaggtccatcaacaatatgggcagattccgttgtatcaggagtatgtagacgcaccttcatgttgcgtgcaggttgacggtggattgcttgaagggcgattgctgacaggtgtatacgtatctgaggagcagttcttcgggcttaatccatatctgaaagatggcgatggaggacggacatacatgcaggctagtgtccaatgataacgtaaccaattagaacataaaaatgatatagattggagagcctgtgtgcaggctctctttcttgtacaagccttatttgcaggcggtagcctataaaagtaacggctttgacacttttttttgccgaaggttgtgccataatagaggttatggacaacagggtgaatgattttacgcagggtggtgttacctacatgatgaagaaaatccccggttacataggtgtatgtttgctcctactggcgatcttggctggttgtagtgagacacagccttctgagcagccaattctcaaagagacagaaacagcgaatacaatcacagtggctgtagatggcagtacgtttttgcctgatgcaacaaagtccattaagcgagattttagtgagggtttgacactcaaaaaagcattactcaatagcggactggttgattttacggcagatggcaaacggattcaatccgtgggtgaagtttctctggattcttcgctgagctgggctgtcaaattaaacggcaaggatattgaacaggaagattgggacatggagcttcatgccaaagatgaagtgatcatttacgtgaaagccgctgacagtgggggggatggcgttgcatatcagacaacgttactcaaggttagcggtggaaacattatgccaacccttaatcgtcaatatgccggcgtctacgttcaagagtgcacagttcgcgatgtgttgaagtccagcggcattgtaagaatgtcggagaacaacaaatttgtcgtttcggtcgagaatgtcacgcctcgtatgaatgagcggtgggtcattatggtgaatgacaaagaattaatggaaaatggtctggacatgaaattgaatccacgtgatgcggtaaagcttgaattaaccaatgcatcctaagtataccaagaagcccaatctctttttagagaactgggctttttttcattaaatatataaacaagatccgatcagcatagtcaaatattaaatacgacagatctcgttcgggcaaagctcacagtgacagattccttgtagcatcttcagatctttgatgacaatcatgccattgtcatattcaatgccatctttcttacgcaggtcgcttaacatgcggtttacactttcacgagtggctccaatcatattggacaggtccgtgtgggtaatttttttgtgaataatgacatgctctccatgaggctcaccatacgaattcgacaaacgaatgagggtggagcagagtgcacccggtttgccgtataacatgagatcccggaatttggtctgtgtcaaccggtggtggatgcccatccatttcataaaatcgatcgcaaagtcacaatgctggcagattaacatttccaggtctttatgttccagtacaccgatctcgctgtcctccaatacttccgctgagaagctgtgtttagagccaaagaagggatcagcctgcccaatcatatcaccggattgatacatgtacatgatcagttccttgccttcatccgtggatttggtgatctgggcacggccccgtttcatataataaagtttgtcagagatgtcgccttcccagtacagatgtgtaccttccggataggttctatctttcatggtaaccagcagatggttgaaatttgcttccgagaaacagttagtattaccgcgcttttccagtacagttgttagttctctcataagtctatctcccctttatgtccatcggacgaccttctgtagtaagcagtagcctccgaggttcgccgcaaaccgttgccgtcctgatcagggtcatctcggccgggaggaaggacggtacaaattgcggtggttcaatttttaagttcagtatatacctaatcttaccgtttgagggggaaggaaagggggcaaaaatgacgaaatttcaaacattgtgataaaattcacttttaatggagaggatgaattttacagccctatattttaaataagaagtaaaaatggtcgtatgaaggacactacaaaacttaaattaaatttgttatactttgtgaaaaaaatcacataattaagtttattgtcatgttacgatgtgaatgtaaacgagagagacaaactaatacgaacctttaggaggatgagggagatggctgtaaagaacgaagtcgccccagcaaaagaaccgacagcaggtcagtatattcaaacgttaatcgacaaagcgaataaagcacacgccgcattcatgaagatggaccagaagcagattgaccggattgtgcaagcaatggcgcttgcgggtctggataaacacatgatgctcgccaagatggccgtagaagaaacaggccgcggagtatatgaggataaaatcaccaaaaatatatttgcaacagaatatgtgtaccacagtatcaagtacgataaaaccgtaggtgtgattgaagataacgagtatgaaagcttccaaaaaattgcggagccggtcggcatcatcatgggtattacaccagttaccaacccaacatcaacgacgatgtttaaagcattgatttccatcaagacgcgtaacccgatcatctttggttttcacccatctgcacagaattgtagccgggaagctgccaaaatcctgctggaagcggctgtgaaacatggtgcaccagcagattgcattcagtggattgatgatccttccatggatcgtacaaacgaactgatgaatcacaatgatgtggcactcattctggcaacaggcggatcaggcatggtacgtgcagcgtatagctgtggtaaacctgcactgggcgtaggaccgggtaacgtaccttgctttatcgagaaaagcgcggatattaatcaggcagtaacggatttgattctgtccaagtctttcgacaacggcatgatctgtgcttccgagcaagcggtcatcattgaagagccgatcttcgatcaagtgaagaaaaaaatgatcgcaaatggctgttactttgttaacaaagatgaagcagcaaaattgacagcaggtgcgattaatgccgagaaatgtgcggtgaacccggcgattgttggtcaatctgcggtgagtattgcgaagttgtgcggtattgaagttccggcaggcaccaaaattctcgtggccgagattgaaggggtaggtactaaattcccattgtcggctgagaaattaagcccggtactggcttgttacaaagttaaaacggcagcagagggaattgaacgtgcagcagaagtggttgcttttggcggcatgggtcactcctcggttattcactccacaaatgaagaagtgatcggcaaattcgcagatcgtctgcaaaccggacggattattgtgaactcaccatccacacacggtgccatcggggatatctacaacacaaacatgccgtcattgacactgggatgcggatcatacggacgtaactcgacttcttccaacgtaaccgctgtgaacttaatcaatgtgaaaagggtggctcgccgtaccgtgaatatgcaatggttcaaagtgccgaacaaagtctacttcgaaaaaggagcaacacagtatcttgccaaaatgcctgacatcacacgtgtggccattattacggatgccatgatggtgaagcttggatatgttgaaaaggtagaacactatttgcgtcaacgccaaaagccggtagcgatcgaagtattctccgatgttgagccagatccatccacaacaacggtagatcgcggaaccgaaatgatgcgccgcttccaaccggactgcattatcgcactcggcggtggatcaccgatggatgctgccaaagccatgtggttgttctatgaatacccggacacggacttcaacgatctgaaacaaaaattcatggatatccgcaaacggatctacaaatatccacgtctcggcgtaaaagcgaaatttgtagcgattccaaccacatccggtacgggatctgaagtgacatcgttcgcggttatcacagataaaaatcaaggtaacaccaaatatccattggccgactatgagctgacaccagacgtagcgattgtcgatccggagttcgtatattccctgcctagaacagcggttgccgacacaggaatggacgtactgacgcatgcgattgaagcttatgtatctgttatggcaaatgattacacggatggacttgcgatcaaagcaatccaactggtattccaatacttggagcaatctgcactgcaaggcgacaaactggcacgtgagaaaatgcataatgcttccacaattgccggtatggcgtttgccaacgcattcctgggtattaaccacagcttggcgcacaaatggggcggtcagtatcacaccgcacacggacgcaccaatgccattctgatgccacacgtcattcgttacaacgcaaaaaaaccgaccaaatttgcatcgttcccgaaatattcgcactttgtagcggatgagcggtatgccgaaattgcccgcatcttgggattgcctgctcgtacaacagaagaaggcgtaaccagtctcatcaatgcgattcgcaaactgaacaaaacattgggtattgaagaatcgttccaagagatcggattcgatgccaaagactttgaagcacatgtcgattatctggcagaccgtgccttcgaagaccaatgtacaaccgccaatccgaagttgccgctggtaactgaactggctgatgtataccgcaacgctttctacggaaagtttgaataataaatttagaacgaagcgtgccttacggcaagaagatcagggttccccgagaggggagccccgattgccgtctttaacacaataacgagagggcagaaaaacagaagagcgaagcacctgtttttcagggtttattctaagatttggtttgctccgagcatagaggagcaaagggttctatagaggttacacggaattcgtgatgtggctgtttgagccagatgttcacacaataacgagtgggcagaaaaaactgaagaagcggagcgttcgcctttatccccggattttcccctttgaaatataaaattgaaaaaatccggggataacagcgatcggaagttgttctgcccgcgcagtggctaagtgtgaatttacaggggtcaatgggacacagcgcaggtggagtgagttagttcactggctttgtgacaaaaatcacagatgatgaaagccccaagtcgtatactgaaaatgtaagaaaaacattcatcccgcggttccggttcccaagtagagagaacatgttccggtttatgtgaaacaattcacattaatcgcggctctgggcacacaatgctacgaatgaagcaagatgttatgtgtccagaaatccaaattagtggagggattacgatgtcggtgattgaaaaagatgtcaaacaacaaacaggctggagaaactttaccaaaggaacatggaccaaatccgtagatgtgaatgattttttggcacacaacttgtctccgtattacggtgacgaagcatttctcgcaggtgcaacccagaataccaaagaattgtgggagatcgtatctgatctgaccaaaaaagaacgggataacggcggtgtccttgacgttgacgtgaacacaccaggtactattatttctcaccaacccggttatctggatcaatccaaagagcagattgtcggcgttcagaccgatgctccgttcaaacgttccattcaaccaacaggcggaattcgcatgatgattgacgcatgtgaggcatatggttttgaaatgccacagggcgtcattgatatatttacaaacattcgcaaaacacacaaccagggtgtattcgatgcttatacttccgacatgcgtgcagcgcgtaaagcaggaattattacaggtctgccagatgcttacggccgtggccggatcatcggtgactatcgtcgtgtagctttgtacggggtagacttcctgattcgtaacaaaaaaggcgaactgaatgcactcgaagttgatgttattgatgaagatgtcattcgtctgcgggaagaattgtctgaacagattcgtgcattgcaagaattgaaacaattgggcgatatgcacgggttcgatatttccttgccagcgacaacagcaaaagaagcgttccaatggttgtacttcggttatctcgctgcgattaaagaacagaacggtgctgcgatgtcactgggacgtgtatcttctttcctggatatctacattgaacgtgacctgcaagaagggattttgtccgaagaacaggctcaggaattggttgaccatttcgtaatgaaactgcggattgtcaaattcctgcgtacaccggattacaacgaactgttcagtggagatccaacatgggtgactgagtccatcggtggtatgtccgtgaatggtgaaacacgtgtaaccaaaaacagcttccgtttcctgcatacactgcacaacctgggtcctgcaccagaaccaaacttgactgttctctggtcaacgaaacttccagaagctttcaaagattattgcagtaaagtgtccatcgaaaccagctcaatccagtatgaaaatgatgatctgatgcgtccgatctacggtgacgattacggtattgcttgctgtgtgtcggcgatgaagatcgggaaacaaatgcaattcttcggcgctcgtgccaacctggcaaaagctctcctgtatgcgatcaacggtggtcgtgacgagaaatccggagcacaagttggacctgagtatcctgccattactagcgaagtgctggattacaatgaggttatgaaacgcttcaaaccaatgatggagtggctggctaagctgtatatgaacaccctcaacgtcattcactacatgcacgataaatacagctatgagcgtatcgaaatggcattgcatgaccgtgacattgtacgtacgatggcttgcggtatcgctggtctgtcggttacagcagattcactgagtgcgatcaaatatgccaaagtaaaaccaattcgtaacgaacaaggcatcgctgttgatttcgaaatcgaaggagacttcccttgttacggtaacaatgaagacagcgtagacagcattgctgttgaactggtcgagaacttcatgggcatgattcgcaagcacaaagcttaccgtaacgcagttccaacacaatccgttctgacgatcacttccaacgtggtatatggtaagaaaacagggactacaccggatggtcgtaaagcaggtgaaccatttgctccaggtgcaaacccaatgcatggtcgtgacaaaaaaggtgcactggcatcccttggctcggtagccaaattgccttatgaacacagtcttgacgggatttccaataccttctccatcgtgccaaaagcattgggtaaagaggagactacacgtaaatccaatctgactgcgatgatggatggttacttcggtcaaaacgctcatcacctgaacgttaacgtatttgatcgtcagcaattgattgatgcgatggatcacccggaaaactatccacaactgactatacgggtatccggatatgccgttaacttcattaaattgactcgtgaacaacagttggatgtcatcaaccgtacgttccatggctcgatgtaagtaatttgctagtagaagaccgctagagcaaggtattccaaatcatattaaacgcacagcggatgcggatacagaaaggaagaggcagcatggttaacggacatattcattcactcgaaactttcgggacggttgacggcccaggcatccgctttgtgctttttatgcaaggatgtctactcaaatgtcaatattgccacaaccctgatacttgggcgctggatggtggaaaagaaatgacgcttgaggaggtactggctgaaattgagccttacctgtcttactaccgcagctccggaggcgggctcacgatatctggtggagaaccaacgttacaggctcactttgtagccgaaatcttcaaggaagtgaagcggcgctggggattgcatacgacactggacagcaacggatttaacgaaccggaacggattcacaatctcctggatcacacagacctggttctgctggacctcaaacatattgatgatgagaaacatatcaagttgacaggcaaatccaacgagagaacgttgaaaacggccaagtggttatcggagcaaggtcggaaaatgtggatacgccacgtgtatgtgcctggcattcataacgaggaagaggatttgcttaacctcggacggtttattggaacattaaatggcgtcgagaagttcgaaattcttccataccatcagatggggatctacaaatgggaggcgctcggcaaagtatatccactggatggagttccttcaccaagtgaagaagaagtggagcgggcgtatcgcctgatcgaacaaggtcgccaggaaacggctggcgtggcttgttcaggtaagtgatctaacctttatatagtaaaaacactcaaccaagcagtccttgcgaacatgtttcgcaggggctgttttttgtccagtgaaggattttatccctccattgatgaattgtcatccttacgatgtaagctccggctttttataatcagagtgtaaagccaaatgctcaatatcttgaggagggtcaaccagatgaaaaaaagaatgacattactgctttcattattgcttatcacttcatggactttggcgggatgtgcaagctcaagtaacgagccacagcaaggcgcaggcaatacacctgtggaggaaacaagtaaggaaccggttgaaatgcttctccgccacacgcaggtgggagccgacaaacagaaaagactggccattctgcaggatgttgtggacaaagttgagggagagatacccaatctgacctttacgctggatggtgtcgaatccgatgtaaatcgtaaggaaaagcttcgcggagagatggcggcaggtaacccgccggatatatttgaactgttcggtagcccggattccaaagtttatgccaaggaaggtatgctgcttgatctgaccccaatcctgcaagagctgggcattcaggaccagtttacatcccttgaaccgtttacgtatgaaggcaaagtatatggactgccgattggcggttcgggcgaaggttttttctataataaagagtacttcgaacaaaaaggatggaaagccccaactaccatggctgaactggacaatatactggctgagatcaaggctgatggcaaagtgccgcttgcttccgcatctaaggcgggctgggtgccgcttatgttaaccaaccatctgtggtcccggtatgccgggccggagattaccgcaaagtttgcaacaggtgaagcgaagtggaccgatccgggtgttgtgcaaggttttgccaaacataaggaatgggtggataagggttatttcaaaaaaggtgaactgggctttgagtatgccgaatataccacgcaatttacaagtggagaagtggtattaatgtatgacggaacatggaaatcatctgtatttaaggaaggtcagagcggtgaatcgctcattggcaaggttggattcttcaatatgcctccggtagagaacggagcaggagatcagacgtctttgatgcgagatgtgaacaatggatacggattctcggcagcagtggcggatgacccgcagaagctggacgcagtgaaagcttttatcaaaaatttctacaatgaagatatgcagatccgcggccttgtggaagacggtgtgttgcctgccatgaagctggacgagaaagtgctgaccgatagcattaccgatgatctgatgaaagaaattgtggctgtgcttaatgcgtccaagacgtcgttcccggcatttgatgcacttgttcaggccgatgtgacgacagagatcagcaatctgcagattcagaagttgattggtgggcagacgacgccagagaaaatggcagaagagctgcaaaaggtgcaagaggaagcaaacgcctcagtggaataaacgaattcaagtcgaaactgcgatcgttgaagtgactgaaggaggctgaccatgaatacttcactccgcagcccgttaatctatacgttgtttgtaatgccagccctaattctgtttgtaatgttctttctataccctattggtagctccctgtattacagtctgacgagttggaatggggtatcggctgagccacgttttgtgggtttatccaattatgtgaaggcactgaccgatgaacggttttggatttccacaaggaataacggctttttcatcggattttcggtactgattcaggtacccctgatcgtcctgttttcgcttctgattgccaatgtgaaaaggctgaaaggtctgtataaaaccgctgtttttttaccatccatcatgtcgacagccgttatcggtattttatggggattcatctatgaaccgaatatcgggctattaaacaaaatgcttcatgtgctgggaatcaatccaatctactggttatcggataaccgatttgccatgttgtccattttggtgaccaatgcctggcagtggacgggattttacattgtcatggtgctggcggccatactggcgattccccgtgatctggatgaagcggccgcaatcgatggtgcaacggcggtacaacgtgcaatgcgaattacgttgccgctgatccggccgatcatttcagtggtgattatgttgtccatcgcaggtgccatgaaagcagccgacatcgtgattgtcatgaccaaaggtgggcccgctgggtccaccgaggttctggcgacatacatgatcaaatatgcgattaccaacttcaaatatggctatggcaataccattgcagtgctgatctttgctctgacgcttgtgctcactgcggtgtatcaactgctggtggcgaggcggggcgagaaggtggaatattgatggcgaaaagcataaaaagcagtatacctcatgtgttgttaatgttgtatttaatcgcgattttgtttccctttttatttgtaattttctcttccttcaagcaggataacaatgaaatcgctctgaatccattcggtttgcctacaacatgggagtttaacaattacgtggaggcctgggtgaatgccaagattggcacgtatttctggaacagcctgtacatttcggttttatcgtcggcgtgtacgattgtgctcggggccatgtttgcttttgccgtaacccggatgagacaccggagatggagcctgtttctgtacagcctgattctggcgggtatgcttattcccaacaatgcacttatgctgccgatttatctgcttgttcgcaaaatgggcatattggatacacatctggcattgatcgtgccctatgtggccaatgcgattccctttaccattattatactggcggcttttatgcgttctctgcctggagaaattgaggaagcggcggtcatggacggcttgagggccccgggtatctttgctaaaatagtgatacctcttacagttccagccattgttacggtttttatcgttaatttcctcggcaactggaacgaatttttactcgccaactattttttatccaccgataaattgcgtacgctgccagtgggcatggtccagtttcgggatcaatatcagatgaactatgctcagatgtcggcaggtattgtatacagcgttgtacctgtacttgtgatctacgctatactccaggagaaaattatagaaggagtaactgcaggtggtgtcaaaggttaataccatgaaccagttaatagggagaacgggatatgaacttgcgaatgaagctggccttggcatttctgctgctgattattgtaccgatgtgtgcactgggcattggcatgtttctggtcacatcacatacgattgagaaaaaatacaatcaacaggccgaatatgcgcttcaggccattagttataatatcgagaatgtatttcagcagattaacaatgtgactgacaacgggatagcgacatcggtttttcaaatggcgttgaacgccaaagatccaaccaagcaggatctgggaaccggtaatcagttatccctgaatgccagccagcgcaatttccgttcccttctatataattatccattcatcagttatgcctttttatatgatttgcgttcgtccgagaataaccagattgtctccattttcaccaaagaaaactttcaagcccttccttttcagcaattcaaagtgcatcccttattcaacgaaattcagcaacttaatggcgtgcctaaatggctcgcacctctggaatatcccgaattaaccggggtagaacctgtcttcacccagatcagactggtcaaagaactcagttattttcaaaatatcggcgtgcttgttgttcagatcaaaaaaggagagatcgaccggatcttccgtcacctgcaaatcagcgattcggcacaggatacgtcgttcctgttaattaacgaagaagggctggtcgtttatgatcctgcagggatttataacggtgagaacatgcaaaaccttggtgctgaatccagcagttacggtcctggctttagcagtgtcagaacggtctttgacggcaaagagagcatcatttcgcaatatcatctgaagaactataactggagcctcgtcagtgtgacttcatgggaagccttatctgccgaaacgaatgcctttgcaggttggtctgtcatcattattctgttatgcctgctcgcagcgatgatctttaatctttttttcatgaatcgcattacgggtaacattgctgtacttgtaaggtttatgcgtcgtgtggatgatggtgattttaatgcgagggtggaaggaaaaggattcgatgaaatgcagctgcttgcgcaagggttcaatgaactattggatcggatcgggggattattccgtcgtgttcgggcagagcaagagcagaaggcccaagcggaactgcgtgtactacaggcgcagatcaaacctcattttctgtttaacacattggaatccattaatggattagcgctacgaggggagggccgcaaagtaagcgagatggtgaccagacttggcaatatgcttcgtatcagcattcaggatcaggaggagattccgctgggtgaggaaataaggcatttgcagagttatctggagattcaacagtacagattcagtgatttgttcacctatgagattgacattccaccccatctatacagctctattctgcttaagcttacccttcagcctctggtggaaaatagcattcaacacgggtttgaggggatcacctatccaggtgtactgcggataagcgcatatgcggaacggggtcatctggtgttatgtgttgaggataatgggatcggtattccccaggaaatgctcgcacgatttgagtatatggcagaagatccaccggaagatatgctcgcggaaggggctgaatcattatcgtccataacggaacgcaggggattgggattaagaagtgtggcagatcgaattcgtattcaatatggggccgggtatggcatatttatatgttcagcaacggggtatggcacagttattcgatgcatcattccattatatgagcaggaggaagccggatgaatctgactgcaatgctggttgacgatgagctgccgattctggagaatctgaactacattttaccctgggaagagatggggattgaaatcacaggtacagcgagaagtggtgtagaagcgctggggaaagtaacagaaagtcatccagacattctcttgtgtgatattcggatgccgtctatggatggattggaacttattcgtttgctgcgagagcagggtgaaacgtgtgagattattttgctgaccggttatcagcagtttgaatatgctcgaaccgctatcaagtataacgtacatgaatacatatgtaagccaattgattatttgaatctggaacataaacttcgtgagcttgccgggcagatccagaagagacgtctggaaaacgaatcgcaacgttatcgcagccaagagatggaaagctggatcagacacaaacagttgattgacctgttgcgaggagaagcgccattgaaggttgcctatcctgcctctattcctgaattcataacaactgctacaccgtatacgttgctgctggtggatgcagtcggttattttcgccattctatcggctggtccgagcttcagcatcaacgatggcatgagaccataagttccagacttagggaagtggcagatcgaattacggaggagtgtcagattcttgcgacccgcaaaggggagtggtgcatcctgctggaggcatcaggtgagtggaaacgtcgctcagaggaactggcccatcaactgtgtctcgaattaaatgtgatattgtctctggattcaaatgtgaaggttaggattgttcaggatgctgtgcccgtgaacctggaaagtcaaattctggagcgataccggcattgtcaaaaaatactgatgtcccattcggagggtgaagacaaggtgctgaaggcaggttgtcccaaaaccgccttatcgtatgatcatacggcttccaaaggggctaactcatggattacaagagaagatctggagcttgttactcggtggattcgtcaagggaacaagcaggggttacgtgatgtattggatcggcttaaacagcaaatggggaattcaggacaatccttcagcaaggtagatgaaaccaatcttcggtttatgcttgtgcacatgcttcgggaactgcgtgaagtacaggccctcgctgaagagcacgaagtgaatttttggaatgcactgcaaggggccgtctccatgagggaactccttgaacttgcagaggtcgttacccatgcctctcagggcaaacaaacgcaaccacgtccttctgtatcggaactgatcctctctgcatgtgagtatatggacgcacggctgcaacaggacttgggaatagatgaagtctccgattggcttggaatcagcccgggatacttttgccagctatttaaaacccaaatgggtgttacttttgtggaatatatgacgcagaaacggatggaaagtgccgctttattgttgagtacaactgaatggagcattacagcgattggggaagccacaggtttcaaggagcgccggtacttctccaaggtgtttcataaacacttccacatgaaaccctccgagtacaggcagagtaaacaattgggtttgtagtagcaagggaaacggaaggagaggtcgaatgaaacccttgaatgatctgacattggagcaaaaggtaggacaattgttgatgtgtggatttcacagtcagcacgcagatgaacagattactcgcttaatccgtgactatcacgtcggcggcgtcatttatttccggcgtaatgtcgaaagtgtagatcaattgacacggctgtccgccgaactgcaagatatggctgctgaagcaggggccctaccactcatgatttcggtggaccaggaaggtggcatggttgcacggattgaccaagagggaatgacccaagtgccgggtaatatggcacttggtgcgacaggcaatccggaatatacactggagtgtgctcgaattctgggttgtgagttaaaaagcatcggtattgatatgaaccttgcgccagtggtcgacgtgaataacaacccgcttaacccggttatcggtgtgcgttcgtatggtgaacatgctgaaagtgtggccgctcatggcgtagcagccatcgccggatatcaatcacagggcatagctgctactgccaaacattttccgggacatggagataccgctgtagattctcatcttggtatggttacggtacctcatgatcgaaacaggctagaacagatggagttgttaccgttccgcaaggcgattgaggccggagttgatgctattatgacagctcatgtgatgttcccttcgattgagcccgagcccattccggctacgttgtcacataaggtgttaacgggtctgctacgtgaggaaatgggttttgaaggcattattattacagactgtcttgaaatgcatgcgatatccaagccatatggggtagctgaagctgccgttcgtgctgtggaagcaggagcagatctgattctggtgagtcataccttgcaagatcaggttgctgcgctggaagccattgtggaagcagttcgaacgggccggatctcggaagaggttattcatcaggcggttgaacgcattatgacatggaaaaaaaagcgctgtggccagcagaatgatcatctggtttcgccaaaagcgagtgaaacggtcgaagcaaccgatgtcgaaccttttgattgcactgaatccactaaacccactgagcccaacgaattgacgttgttcaagattgcttcaagcagtattaccatcgttcataatgatgggctgctgccgttggacccagagagggacgtatatgtcatctggcctgaggttgtgcaacggacagaggtggatgaaccatggtcccatacagaatcgctgggtattgcgctatcgcagctgcgaggcagagttcgtgagcacaaaattactactcagcccacttatgatgaaacagatcggatattggctgatgtgtcagatagtgaacaagttatcgtatgtacgtacacatcggcaggtcatcttccgaaaaggcaacagtttttggttgaaaagcttagtaaaaatcattcgctgattgtaattgctctacgcaatccatatgatctgctggagatctcgaggccgggtagttatgtatgtacatatgagaatacacctgcagttgttcgggtactgtcccatgtgttaaccggtggactgcaaccaacaggaagtctacctgtccgtttgcgctagaactatttaatccttacatctctctgcgatatggtgctaattgaccatctcctggagagatttttttgttggaattttctattggttaattttggaatatgaatgccaaaaagataattgatagataactattttcatagtattttccttctattaaaagtttacaattctcctcttaactttttagcaacttttcccggttccaagcgtctaataatatgactttttgagggggatatttataaaatgggagcagaaggagccaaagacaaagaatgaatttgaagaagaaattgtccatacttaccgcttttgctgtgtttcaggcgtttgcagtgattcctgccaatgcacaatcagcagatcagagcgatactacatcagtgaatacagccaaagttaaatccgtggaggttgtgaagaaagaacagaccattgcggaatccgaagtgaaatccggaacaaacactccaacatcaaataatgaaacaactgaagaagtgaaccctcctgagacagatgttcctacaggaacagacgcgactcctgttgagccggtaattgaacctatggacgaagaaggtacagctgaggaaacaccagcacctgcaccagtcgaagtggagcaaccatctacaggcggttcatctgttgctggaggccggggtggagacctcactctttatatgaacagtaataaaatgatgcaagatggcaaaacatatcttgctggacagccgatggctgtaaaaaatggtgtatcctatgtagcgatccgtgctctcgttgatcgggttggctatgatgtcaaatatgataacacaactaaagaaacgatcattattagtggtgaagatgagctgcgtttcaaaacaaacagcaagatctataccgttaatggtgtgtccagaacgatgaagggcgcggcttatcaacaaaaaaatacgttcatggtgccgttgacttcaattacacaggctctggacattacgtataaagtaaatcaatctgccaaaacggttgtattgaatctgagtaccaaaccggtggcaagcttcacggtacaaaaagaggtttttgccggagaccaggtaacctacacaaccagatccagctctcccaagggactcagcattgtagatgagcgttggacaggccgtcaggattcattcgaccaaccaggtgtatacacagtaacctatgcggtccaggattcaagtggtcaatggagcgatccgtattcggttacgattaaggttgaaagaccgaatctgccacctgtcgcaatgtttacgacagataaagaagaatacaaaatgggtgagaaaatcacttatattgatcaaagcacagatgatgacaatgcaattgttaagaccgaatgggataacaatgcacttgcattctttgttccaggaccgaagaccgtaacgattacagttaccgataaacatggtgctagcgatagctataccaagatgatcaatattacgggagaaacactttatagtgtgactgactttaatcaattgttcacaccagtcggtgagaagttcacttttgacggtggtggagtaccggcattggagaaagtacctttcacttattatgatgaaccaagtctgttgatccgcagtaacagccctgaaaccgtgaatacggaaggcattgtgtacaaggaatcttcctttggacagacacgcttcatgattcaccatgtgaacaacacgggcaaaagcgtaaaaatgtatgttgtagcgacaaacaacaatgcatacacggcgtccattgaccagcaaaacatgggttttgcaggaccgtctccttttgcaacggtagctggaaagctgtccattgaccgttggttccagtccatgcagaatggtaccggacaaaagaaagtgtacatccagccaggagaaagcaagctgattcttaatgatctgagcgttcttccgatgaaacagggacaagtcatttccttgtattcggatgtattcagtgactatgaactggattacaacattatcatgatcgaagaaaacaaggacccgatggaagtgttatcgagcctgccggttctggatcgtgatggagttcacaaccgtggtacctatccaaatgcaacacggatcattacgtatgatcaagaagtagggtcgaaaccttcacgtcttccacttggagacaatgcaagtgatccaaaccttgtgggaacggaccctatggctttcactgaagcgtccaacgcaggtaacttcggtgtattgtacaaaattacattgaataatgttgctccgcgcacgttgatttcattcaaccctcgtggaggcagatactctggtgtggcacttgtgaatggacaggtcgttcagatttccacaggtaaatctgtaactgcacctaatgagcaaagcgttatgtatcgcacaggttcgtacggcgagagtgtaaccattctcttctcggcggcaccaggaagtaacttgcctgttaacctgctgttcacgccgcttccggctgaaaagtaataccatgaacatgcacggacggtttggagtgaaagcttatatcatatatacccgttcaccccaaaagtcgcccgaacgattgatcatctgaaccgtcaggaagggactccatcaaaatgtaatgtcattagctcaagctagactaatggcaatgcatgtgcatggagtcctttttatgtgatgttggaatgacctaacccggtgtcttcgttgactctaatcgtaatttgatgcattattagaggtatacaagaaagcaaaagtttttgcttttgccgaataaactgtcgctctatgaatgatgcaaaatgctcgtatgacaggaggtgctttagatcatgctgtcgacagaacagattatttcgaccatgtcctcacaggggcttcgcattaccgatcagcggaaaacactggcccggttatttgccgagtctccggggtatcttacacccaaggacgtctatgaatatatgggtaagacttacagcggactgagttttgacacagtatatcgtaatttgcgggtgatgcaggaactgggtgtactggaacaggtcatcttcgaagatggcgttaaattcaaagcgcactgtagtgaagatcatcatcaccatcatatgatctgtctgaagtgtcagaagacatatcctattattttttgcccgatgcagcttgcggatgcgcctgagcaatttcaggttgtagaccacaagttcgaggtttttggatattgtaaggactgtgcagagcatgctccggccaaagcggcatcgggacacacgcatgctcatgggaagcactgaccatgaagttatcgcgcagaattgctcaggcacccattcgggtgtaccgcaactatatctctccattaacaccgccaacatgtcggttctatccgagctgttcggcttacgccatggaggcgattgaagtgcacggtgcgctcaaaggttcgttgttaacagcgaaacgtattgccaaatgccacccgtttcatccaggcggtgtagatctggtgccaccaaaggcggagaaatccatgatggtatcagagtaacgatgtaacttgaagtattcgggtggcctggaagcaggccaggattgaacttgagtatgttgcccacttgacaaaggggtccgcatttcagtatatttttcctatatgatttccagtgaagggataagtacagacacacccccagtgcagagagccggatgagctgagaaccggtctgggaggaggatggaacatggtcccggaggaacctctttcgagcgtgcagacagtgatttcagagctgctgtcgtaaggctgaggcgtgatccagcgttaatgggcggtcgaaggaccgacagagcctgtgttttgcgaaaaacatggggaatttgggtggtaacacgtgagagcaactctcgtcccataggggcgggagttttttgtgttcttttttagttgttttggacgaagggatcacatgaagcaggaacatttgaaggaggagaagtcattcatggctgaccaaaaaacattttatctgacaaccccgatttattatccgagtgacaaattgcatattgggcatgcgtatacaactgtggcgggagatgcgatggttcgctacaagcgtctacgcggttatgatgctcattatctgacaggaaccgatgaacatggccagaagattgagcgcaaggcacaagagaaaggacagacaccgcaagcttttatcgacgatatcgttgtggggatcaaggaactgtggaacaagttggacatttccaatgacgactttattcgtacaaccgaagagcgtcacaaaaccattgttcaggatatctttgaccgtttgctgaaacagggagatatctacaaaggggagtacgaaggctggtacagcattccggatgagacgtattacacagagactcaactggtggatgtagagaagaatgagaagggtgagattatctcggccaagagcccggatagcggacacccggttgaattggtcaaagaagaatcttacttcttccgtatgagcaaatatgcagatcgtttgttgaaatattatgaagagaacccgggctttattcagccggaatcccgtaagaacgagatgatcaacaacttcatcaagccaggtcttgaagatttggccgtatcgcggactacatttgaatggggcgtcaaagttaaaggcgacccaaaacacgtggtttatgtgtggattgatgcgttgtccaactatattacagcactgggctacggttcatccgatgcatccctgtataacaagttctggcctgcggatgtacatttggtaggtaaagaaattgttcgtttccatacgatctactggccaattatgttgatggcgctggacttgcctttgccgaagaaagtgtttgcacatggctggttgttgatgaaggacggcaaaatgtccaaatccaaaggtaatgtcgttgatccagtgactctgattgaccgttacggtctcgatgcactgcgttattacctgctgcgtgaagtaccgtttggttccgatggtacgtttacaccggagagcttcgtagagcgtgttaactccgacctcgcgaacgatctgggtaacctgttgaaccgtaccgttgccatggtagacaaatattttgaaggcaaagccccggcgtttgcatcgaatgtaacggaatttgatgcttcgctggaagaagcaggccatgctacggtggaaaaagtggaacaggcgatggaaaacctgcagttttccgtagcactgacagcgatcagccagtttgtcagccgcaccaacaaatatattgatgagacgcagccatgggcgctggctcgtgatgaagcaaaacgtgatgaattggcatccgttatggctcacctgatcgaaagcttgcgaattgcttccatcttgttgcaaccgttcctgacacgtgctcctcataaaatctgggcacagctcggcattcaggaaggtgaacttacggcttgggatacagctaagcaatggggtctggttccaactggaaacgcattgcaaaaaggtgatccaatcttcccacgtttggattccgaacaggaaattgcttatatctccgaagcaatgactggtggccaaaaagcagcacagcctgaaacaagtcaaacagatgctggaacttcagcagctgttgaaccggtaaccgcacctgaaggtacggaagagatcggtattgacgattttgccaaagttgaactgcgtgtcgcgcaagtcattgcctgcgaaccggtcaaaaaagcggataagttgctgaaattgcagctcgatctgggttatgagcagcgtcaggtcgtatctggaattgcgaagttctattcgccagaagagatggttggacgtaaagtcatctgtgtcacgaacctcaaaccggtgaaacttcgtggtgaattgtctcagggtatgatccttgcagcatcccatggcgaccaacttacactggcaacagtaccagacaacatgcctaatggcgcacaagtgaaataagaaatcaaattctgtcataaaaatgacacaaggtggcccgatgtaattcgggcccctttttttgttgatataattcgtatctgacgggaagagaacaagcatatactgttatgaactccgtacttcaggaaagaatgaataggacgggatagcttgacaagtaggttcaggttacctataattctttcagtaatgtttacgattaagagatgcggagtgaatcataatgacattttataaagtgcaatatcaagctcaggataaccggatagggaatacgagcaaaagaggcaacatgaagttactgtggacgggtttgcttattctcactttgctgatattgtcagcttgtgggcaggatagttccaatagtgcgaagattgtggaaggcaaggtaaacgttgtgacgacattttatcctgtatatgcttttacgactgcaatcggtggtgaggatgccaatgttattaacctgctgccaacgggagtagagccacatgactggactccgaagagtcaggatattgttaatacgtccaaggcacagctgtttctctataatggagctggactggaaggatgggtgccaaatttcctgaagtcgctgaatagcgatacacaggtgaagtctgttgccgttagcgaaggggttaaactgttaactgctgagggtgatgatgggcacggtcacggtgaagagcacgaagacgagcatgcagatgaggctaccagtgaagatgtcgctgatcatcatattgatccacatacgtgggttagtccgaaatcagccatgatcatggctgaaaacatcaaaaatagtctggttgaggcagaccctgatcacaaagcaggttacgaacaacgttatgaagagcttcgtacgaagcttgagacgctggatcagcgttttacagatgaattggctaacgtaccaaacaacgagattgttgtctcgcaccaagcgtttggctaccttgcacgtgattatggattaacccagcatgccattatgggactttccccggatgctgaaccgacaggacaggatattgtgaagcttgcgaaactggttaaagatgagggcattaaatacattttcttcgaagagctggtatctgacaaattggcgaaaacactggcaagtgaagcaggagtggagaccatggtccttaatccggttgagggattgaccaaggagcaggcaacaaacggggatgattatttcaccctcatggagaaaaatttgcaaaatctgctgatcgcattaaaataagatataatgaagaattcagatcgaagagtctttaccgttcacggtgaaggctcttaggacgctatgggattcttatatataatgaagggcggctttgccatgcagcaaatcatgccactatgtcatgatccaattatagagatcgagaaactatcattttcctatggggaccagcgagtgattgagaatctcgattttatggcccaggaacgggactttgtcgggattatcggttccaatggggctggtaaaacgacattgctgcgcatgctggtaggacttcttcctcctgcgcagggagatatcaaactattcggacagtcgatccggaggttcaaggactgggaccgaatcgggtatgtgcctcaaaagaatgcatttaacccgttgttccctgcgaccgttcgtgaagtggtcatgtcaggcttgtataataacaaaaacatgttccgtcgtatgtctcgcaaatgtcagcaacagtgcacggatgcgatgcaggtcatgcggatcgaggatctggcgaacaaacgtattggtcaattgtccggcggacagcagcagcgtgtatttttggcacgagcgcttatcaatcacccggatctgttgattctggatgaacctaccgtaggtattgatgctgaatcacaggccagtttctttgaactgattacccatatgcatgaacatcaccgaatgacttttctaatggtgtctcatgatatggatcggatggagagttatctgggctctgaagctgtggtaacgaatggaaaaattaattttcatgtccgtcattcgcatgaggtacaggattgtgctgagaccaatctgcaacataccactgcacaggtacgctagccgtattccattagattagagtaaggccgaaggagtcgtgtttgttttggaaatattaatgagtgatttttttcagcgtgccctggcgggtgggttgttaattggcattaccgctccgttaatcggactgttcctggtcttacggcggttatccatgattggagacaccttgtctcatgtgaccattgccggtgttgcacttggattcctgattgaagtgtatcccattgcggtaggcttgatatttgccgtgcttgcttcatttgcgatagagaaattgcgcaaagcgtacaagagttacgccgaattatcgattgccattatcatgtccggtggcgtggcccttgcttccttgttcttcacgctgggcaaaggatataatgcagatgtcatgagttatttgttcggcagtatatatacgttagacgctacggatctgaagcttgtaggtgtggttacgctgatcgtggtgattgtagtggcattgttacataaggaatttttcctgctcagctttgaggaagatgcggcagcggttacagggttgcctgtgagaattctgaacatgttgatcactgtgatgacagcacttgtcataagcacggcgatcaagattgtcggtgcgcttctggtgtcagcgctattgacgattccggtagcagtcagcctgttgatggcccgaagtttcaaatccgctattattttgtccgtggtgattggcgaaattgccgtagtccttggactggttgtagcaggtatctggaacctcgcacctggagcaacgattgtattattgctgatcatgatgctgattctgacgatgattggaaaaaaagggttccgagcctgacgactgaacgagaaagcacgtgagcccggggaagggagacatccgcttcatgcctgatgttaatgtatggatggcttttgtagcaggtttagtctcatttatatcaccatgttgtcttccgctgtatccatcatacctctcctacattacaggtatgacggtgcaacaattgaaggatgaccgcaatcagcgcgaagtccgctttaagaccatgacgcatacgctggcatttattttaggcttctcggctgtattttattcgcttggcctgggtgccggactgtttggccaatttttcaatgataaccgtgaactgattcggcaattgtctgcgattttgattatgcttatggggttgtttttacttggtgtgttcaagccacagtttctgatgaaggaacgcaagctggatatgaaatggaaaccagcaggctatctgggctcttttatatttggtatcggtttctcagcagggtggtcgccgtgtattggccctattctaacagcaatcattgctatggctgcaagtgagcccacaacctggctggcgctgattacaggttatacggcagggtttgcaatcccgttcttcattttggcctttttcattggttcgacacgttggatcttacggtattccaatgtcatgatgaaagttgggggagcattaatgttgttccttggggtattgctttttacagatcagatgacgaagattacgatctggttgcagcagattacaccagactggatgatcatttaaacggatgaactgaatttgaattaaaaaatgcatgacaaagcaggctacatgtcaccagagtcactctgggtcatgtaacctgctttttaatcgtttgttaggaatgcttttaactgcatatgattttgggcaatcctgttgttcgtttaggtgaagtaatcaatactggctagtgggaaatgttcaaagatccgttccgtaatgaattcgcgcagcgcatcttgctggtcatccttatacacatacttgtactgaccccagcggccccatttcatcttacgtttctcgatatccatctccagcttggttttaggataacgtttctcaatggttgctttggccgttttggtaaaacggtgctggatcatctcaaaggtaagatccttggttgcttcctctggaagcgtatctgccagcttctgcaacagatccgagtatccttcttcccagccttcataccacatgatcggagcgataatgaatcccaggggataaccggcgtgtgcaattttgccagcagcttcaatgcgttcctcaaatctggaggtagccggttcaaagtttttgatgacataatccgaattgacactaaaccggatacgggtgtggccgttatgtttaaggttcagcaacggatcaacgtgatgatatttggttacaaatcgcaagcgcccatattcttcttccgccataaaacgaatcaggtcacttaaattctccgtgatatgctcgagtcctacgggatcagacgtacaggcagcttcaaatcgtgtaatttcaggcgcgcgttcttcaatgtatcctttggcagcctgaatgatctcctcggtattgacatagacacggacataaggtttcgcaccaagtgtagtttgaagataacaataatggcagtgccccatacagcctgtagagatgggaatggcatattccgctgaaggtttcgactggtcaaacttgagtgttttgcgcacaccgacgaccagagtacgctttgccatccgatatttttcttgttcggtttcacccggcaagtttgtgattcggttatgggatgtggtcatctgataaggtatgtttttggatgtcacccattccataatccgtttgcccttatcatattccaacgcaccgggttcaaaatacaccaaatcgggaataaagggtttagtaccttttgctttacgaactggcggtgaggctacacttgtactcacgaaatcactcctttcgatgcggaactttgcttagtttgcctcgtttggggggaagtcacgcctgccaattacttgtgtaacagcgcgctccgaactgtacaggacttgccaatgcgtattgataacatgtatcattataagatagggaccaggcacgaataggggccggtcagagagaaaagagggaagcagatgccaacgcccagtatggaagattatttggagcgtatatacaaattaattgatgaaaagggctatgctcgtgtgtctgatatagctgaaggactggaagtacatccttcatcggtgacgaagatgatccaaaagctggacaaagacgagtacctgatctatgaaaagtaccgcggactggtgcttacgccaaaaggcaaaaagatgggcaaacgtttgatggagcgccatcatctgcttgaacaatttttgacaacgattggtgttcaggaacaaaatatctacaatgatgttgaaggcattgaacatcatctgagctgggactccattacatgcatcgagtccttggttgaatacttccgtcaggatgagagccggttgcgtgacctcaaaaaccttcaggacgtcatgagtaatacggagtcttaagtttaagcagtggaatacacatggtgatatacaatgaattgtatcccgtgatcaaaggatgcttcttgccgtttcaatggcaggaagcatttttttgtgtgcaatcacaccataatttggtgattttcgcaactaaacgaacggtaggagcgtctattaaactagtagaatttaccgcaaatttataatgattttggaggactgcactaatgaacgttcgtaaaggattgatgttgctactcatttttgtacttggattacagacagcaggcatgacggcacaagcggccgggcagaaggaaatcgctatttttctagacggcaaccgtttggaatcggatgtatcaccctacatcttgcccaaagtaaatgtaacgatggtgcctctgcgtgttattagcgaaggactgggtgcgtctgttctatggtctcaagctactcgtaccgtgaccattaagaaatccgattcggtcatctctatgacgagcggacgccagcaggcgaccgtggataacgctgtagttggtctggatgcatcggtcgaattgaaacaaggtcgagtcatggtacccattcgattcgtcagtgagaacctgggcattcgagtgaactggaatcaggctgcccagaccattgatctgtacacaggagacgaatcagtcccaactcctgaaccaaccccggtaaccccagcggagcctggaggcacgggcactgtaccagcttctgaagagatgcggggagcctggatttccactgtgaatggagactggcctacatccggtgccaagggaaatgtagagaagcaaaaacaggagtatacgaaacagctagatacgttgcaaggtatgggcattaatgccgtatttgtccaagtgagagccaatggggatgccatctatccttcaggtctggtaccttggaacagcgtattgacaggaacacaaggtaaagatccaggttatgatcccctcgcgtttatggttgaggaagcacacaaacggggcctggagttccacgcctggtttaatccgtttagagcaacgaactcagcaagtacatcaaacttggctgcaaaccatatctcgaagcttcatcccgactggattgtgaatgcatccggcaaaatgtacattaacccaggtatcccggaagccagacagcacattatcgatacgatcatggaagttgtcaatcagtatgatattgatggggtacatctggatgattatttctatccgtccaatgtgacttttaatgatgatgcagccttcaaaacctataacacattaaatactaaggaccgtgctgaatggcgtcgggacaatatcaatcagttcgttaagcagctcgggcagagcattcacagcgtgaaagctaacgttgaatatggaattagtccatttggtgtatggcgtaacaaatctgttgatctgacaggctctgataccaaagcaggagtaaccgcgtatgacagcatgaatgcagatgtgcggacatggattaatcaggagtggattgactatgttgcccctcaggtatattggagtatgacattaaacgtagcccgatatgacaaagtcgtggactggtgggcgaatgaagtggctaacacaaatgtaaaattgtatatcggtcactcgccttataagttaggtacgccggaaattggctggcagacatcacaggagatcatcgatcagctgaactacaacaagaagtattcttcggttaaaggggatatattcttcagttcacagtacctgacgaagaaccctctcggcctaattgctaaattaaaagcttattatggtctctaaaacattttaacaatacagtgataagacaaacccttgttctcatagagtggcagtagaaacgtggctgcctggagaacggggggtttttgttatgttaattaacgcggtgtttgaaggtggaggcgtcaaagggatctcgcttgcaggtgctgtgcagggtgctcaagactgtggcattcagtttaatcgagtggcaggcacatcatccggttccattgtagctgctctgctagcggccggttacagggccgaggagatgaaagtcattattgagaataccccctttgtttcattgctacgtcgttcccccatatttaatacgcgatggatcggacccgcggcaaggctgttcttgaagaaaggactatattcgggagaagcgctggaatcatggattcgtaagatgctggagcagaaagggattcgcacattcgctgacttgccacaaggtaagttgcttattaccgcatccgatatatccaatgggaccattctggtgttaccagacgatattcggcggttcggcattgaccctgcgaagctggatgttgcaaaggcggtacgtatgagttgcagtatcccgtattttttcgatccggtagtcatacgcaaatcaccattattctccaaagggcttccttttcaagatcagttcgtttatgtcgtggatggtggattgcttagcaattttccgttgtggctcttcgatggtgatcgctcggcacgaggaggagacgttattccggttgttggattcaaaatggtggggaagacggaagtggaacctgcccggattaaaggaccgctaagcatgcttcaggcccttgtggagacgatgctcacagcacatgatgaacgctatattgaacagattaaccggtttcggacagtgaagataccaacgcttgggattaaaccaacgcaatttcatttatcgttacaggacagcacggcgttatatcgatcaggtactaccgcagggagtgaatttttcaacgggtggaatatgaaagtgtatgatgaacagctggacaaacaaagaaaagaattgcgcaagaaacaggcagaagctccgcctctgattcctgtataaacgcgaaaaaagcaattctccgcatattgggagaactgctttttttgtatatcagtaacttttaatgaaatttcggtatatcttcatcgcttttacctttttgtccctgaatcacttggaaaggataatccttgcgtttcttagaagagccgctgctctttctggcactggactgtgcattgacttttgccatggttcgtgccgatggcttgatctttggtgatttggttttgcttgcccagcgacgaggcggatatttgtacagcaggaatacggctccgaacacgaccagaggaataatgatcctggatggactagcgttccccacccaagtcaagactccaacagcagctagtgcgatgaacgtccaaaataagattgcctgcttgttcatatcattcaccctttcacaggatcgagtgttgcaacaggtacttctgacgtagcagagacattggcaagcttggcatccaactcacgcatgcggttaaacgaagcaatggagacttctacctgttcgttggtcggttcttttgttgtcagcaattgcagccacaatcccgggtatccgagataacgcagtacaggaatatcacgtactgaattcgtgagctttaacagttcaaaagaaatgcctagcacaactggcaataacaacagacgctgacccatccgttcccagaggttatcgtacgtgaagagagagtatagaaacactccaataatgacagtcaacataatgaaactgcttccgcaacggtagtgcagtcggctgtacttttgcacgttctccggtgtcagttcttcaccagcttcatgtgcgctgattactttgtgttccgctccatgatactggaagagacgtttaatcatcggcgtctgtgagattaaccacagataagcgagtaacaggatcagcttaatgccgccttccagtaaattatgcaaaaactgattgtcgaatgcatttttgaatagaaaattctcgataacaacaggaagcaatgtgagcacaactttaccaaaaaggaatgaaaggatggcgacggcggtcacaccaatgatcatgcttaggctccagcccgaaccttctttctctttttgcttggccttctcttccggttccagttcatcatcagcataggcgtcagcagaataattgagatgtctgctacctttgacacttgaatctataatgctgacaattccgcgtaataaaggaatccgccgcaatttcgtgacccaggacttgtcttgcttgggaacttccagatacgtaatttcgccgtcttttctacgaacagctgtaacgttgacatgtttcccaccgaacattacgccttcaatgacagcttgccccccatagctgacaggcttggattgttgaggcaaattattcaccttcctattctgttctaggccttcgcgatcaaaggcagtttaataaccctattgtatcgaattttgagaccaatttctagtttgtgagtcaaaccttgaaggatgttgttaagattgtcctgttttgaacatactacctcgtagaatcggagtggaaattcgaggcataatgcgggattatcaacggaatgaaggagaatatcgatgacagaacgtaagcatgaagatacatcacaagatgaaggtcaacgtccgaaagaacggcagccaaaagacaagggcaggcgccctacccagaggcaaggtcaagcacactactatacgaagccattttcctttgcattagagcttggcttctttgccggttttatctggggtgggctacattggctattctatctgttgcattttacgattgtacctgtcggatttctggccgagccttttttcaaacatgaatatatatataccgcagcaggacatttgacaggctggctgttttttatcgtcttttccatcttggcatccttactctacacgttcacgattagaaaactgaaaggaccgttacccggcatggtatatggaatcgtctggtggctgattctctttatactggtcggaccaaaactggggatgatgaaacctttgaacggtttaacgtgggattcaatcatcacggagctctgtttctttttgctgtgggggctgttcattggttacacggtagccatggagtacacggacgaacgcaaacgcgagccggagcaagcgggggcatagcgcaaaaaagcttctcaatccggcaatgcctgtgttaaaatagcagatggttatttgcagagagggtggagcagcgatgaaacgaattattgtgatcaatggtccgaacctgaacatgcttggtgtacgtgaaccgggcatctatggaacgcttagtctgaaggatattgaggacaaaattcgcagacaggctgatgaaattggcgtctccatcgctttttatcaatcgaaccatgaaggggacatcattgaccgcattcatgcagcgatgggtgaggcagacggaataatactgaatgctggagcatttacccattatagctatgctatacgtgatgcaatcaatgctgtaaaagtccctacggtggaagtacatctatccaacattcatgcacgcgaagcgttcagacatcattcagtgattgcagcggaaacaatcgggcagattgccggatttggcgaagtaagctatgaactgggattgctggctcttgtgcgtcatctggacaaacaaacctgagccgggaacccgggaatgtgagagaaagaagggttaccgatggaaaacaaacgagtaaataagttgcgtgaagccatgcgtgagcatgaactcactgcaatgctgattacaaacccgattaaccgtcgttatatgacgggttttacaggctcggcgggatatgtgctgattacggaacaggatgcatatctgctgactgatttccgttatatgtcacaagcgcctcaacaagccaaaggattcaccgttgtggagcatggagccaagccgatggatacagtgcgtgaactactggcatccgcaaatatcaaagaagtgggcttcgagcaggatagtgtcacatttggcacgcattccgcttatgctgaagcacttcaatctatcgaaatgaaagctgtatccgggatcgtggaacaacttcgtatgttcaaggatgaagatgagatcgcggttatgcagagagcagcagatctggcggatgccacgttcagccacgttttgcagtttgcaaaaccaggtatgacggagcgtgaagtggatctggagatggagtttttcatgcgcaagcatggagcaacgtcctcttcgtttgacaccattgtagcatcgggtgaacgttctgctatgcctcacggtgtagcgagcaacaaggtcatcggacaaaatgagttaattacatttgactttggtgcacttttggacggatactgttcagatctgacacgtaccattgcaacgggtacacctgtacctgaactgcgcaaaatttatgacattgtactggaagctcagttacatacgctggagaacctgaaaccgggcatgaccggacgggaagcagatgcattggctcgtgatatcattgcaggtcacggatatggagatcaattcggacacagcacaggccacggtctgggtatggaagttcacgaagctcctcgcttgtccaagcttagcgacgatgtattgaaaccgggtatggttgttaccgttgaaccgggtatatatattgacgggcttggcggcgtgcgtatcgaggatgacgtagtgattaccgagacgggtattcatattctcacgaagtcggacaagaagttcaccgtaatcggctaaattacagccacagggatataagacgatttttaatgtgttattatttaaattgaaaataagaaatttcaccatagcgaagagtgcagaaccaatctgaagaagcgaagcgttcgcctttatcaccggattttcccattgataatgggatcaaaaaaatctggggataacagcgatcggaggatggtactgcaatcgaagtgaacgaggtggtcattcttgggctcattttacatataacattaacccatcgtcttatatcacctactttttaaccatatcaggagggattttttgtgatttcagtaaacgattttaaaacaggcttgaccgtgcaagtagataacgatatctataccgtgcttgatttccaacacgttaaaccaggtaaaggcgctgcctttgtacgttccaaattgaaaaacctgcgtaacggtaacactgttgaaaaaacattccgtgcaggcgaaacgattggtcgtgccatcatcgaaaaccgtggcgtatcctacctgtatgcaagcggtacagagcacacgttcatggataacgaaacatatgatcagttcacattgactagtgatcaacttgaatgggaattgaacttcctgaaagaaaacatggtcgttaagatcgttagctaccaaggtgaaatcctcggaattgacttgccaacaagcgttgagttgaaagtcatcgagactgagccaagtgttaaaggtaacactgcacaaggcgctaccaaaaatgcaaaagtagaaacaggcttgaacgtacaggttcctttgttcattaacgaaggtgacgttctcctgattgacacacgtgaaggtaaatactcttcccgtgcgtaactttcacagcttgtaagctaaaaaaggttattaacaaccctttgccattcctttggcagagggttttttcgaaaaaagattagcctatcaggcgctttcgtaatatactgggttaaagtcatttctcgtagagaataatgacgatggacattaattatgcatactgcacaaggtagggagtggatttgcgttgtcattgtacgtcatgaaatttgggggcagctcggtcggagatacagaacgcatgaagcgtgtagccggacgtgttgtagaaaaagctgatgaaggacatcggtgtgtagttgtggtttcggccatgggggatacaacagatgatttgattgatcaggcaaaacaactgaatagtgaactgcctgctcgtgagatggatatgctcttaacgacaggagaacagatttcgatctctttgttatcgatggctattcaagcgcttggacgtaaggcagtatcgtttacgggctggcaagcgggattccgcacagagccggttcacggaaaagcacgtattcatgatattcaacctgaccgagtgaatgcagcacttgccgagggcaacattgttattgttgcaggcttccagggcatgacggaagacggcgagatcacaacgctgggtcgtggtggttcggatacaacagctgtagcactggccgcggccattaaggctgatgcgtgtgagatctatacggatgtagacggaatctattctacggacccgcggatcgttaaggttgcgcgtaagctgaaagaaatatcgtatgacgaaatgctggaactcgctaatttgggagcagcggtgctgcatccgcgtgcagtagagtacgcgaagcattccggtgtacctttaattgtaagatccagctttaaccataatgaaggaacggttgtgaaggaggaagcagcaatggaacaaggcgtagtggttagtggtattgcctatgacaaaaacgtggctcgcatcagtattctgggtgtgccggatgtaccaggagttctggccgaagtatttggtgcgcttgcatccaatcagctggatgtggacattatcgttcagagcggtgtgatggatggcaaagcggacttctcgttctctgtggcgctgtctgatcgtgagaacgcattacgtgtcattgaaggccttcacagccgcttgccttaccgtgaagttacatctgaggagaacctcgttaaaatctccattgttggtgcaggcatggtcagtcacccaggtgtagctgcgaagatgttccaagtcatttccgcagaaggcgtgagtatcaagatggtgagcacttccgagatcaaagtatcttgtgttattgacggagataagctgcatgacgtcattaaggcattgcatacagcatatgatctcgacactgccgagcaagccgttatcggtggacctcaagatcgcagataagtatcttcaatgtatgtaaattagcaaaggtgtactgttgccaacgggcagcagtacacctttttttgtttttctcatggcaattctcacattaacttgaacatctttcccccgcgtatgcctctataaggctgcatgcggttcccctcccccatctcgggaacacaatccagcaggtttaattgagaacaatacgaaatatcatgaactctgcctaacttttcaagcctccgcccgctaacagacccctggaccaactccgggatgctctcactacgttgggataccgcctgatgaagcactatgccgagatcgttaagttggaggggagaacaggattgacggtgcagttcatcgatgatacatccagcacacaagccgtcctccagagcaaattcatcttggttccccgcacataacagcaatacatctcgttgaagttcacatagagctgctgcaacagcccgcacattgagaaatgaaccagcgaatacatgtttccccttggaagccttgatcaaagctcgtgttccatcggttgtggttagaatgattgttttatctgcaatgcctgcagtcatatattcatagggggaattccccacttcgaatccggtgatttttttgtcaaaacgctccccgcctcgaatgcaatctttcacttccatttgtttggcttgtggaacggtctctacggcaatcacagccgaagcgtcatacgccagagccgtaacaatcgtactggtcgtacataatacatcaatgacaactgcacttcgccctgcaatatcaatggtacgtacttcattcacattgccaacgacatcaactcgcactccccacaactcctttctgtatctggggatcggtagttctgttttgaaccggaatggaacttacctaatctgcaattactatatgcatgcacatctagacgggtgcctagaacagaaggtgcatctatggtttcaactctcaaccgtattctgaagaattgatagatttcagcgtcataaattaaatgtacaggcataaacttgagatatgaacaagcgccagaagtgtgaaccaaatgatctcaaggttggaggagcctactcatgaaggtgaactggagggaactttttccggaaccgatccgaaccattctcggaagaatgccacccgctctattggaacaagtggaggaagtacgtattcgagaaggcagacccctggagattaatgcaggcaacacataccacttcctgacacctcaaggttgtccgaccgggaatcctgaagaagcgtatgttcctcagaaagaagtgacgcacaggttgctggacctgatcagtaaccattcactttatacattggaagaggaactgcgcaaagggttcatcaccatacctgggggacatcgaatcgggcttgctggacgaacggtactaagcggtgggcgtgtcgaatacctgcgtgacatcaacgggtttaacgttcgggtagcccgtgaggtacatggagtggctgatcgtattcttccttatcttctcgatatgaagagcggacaggtcctgcacacgttgatcctatcaccaccacaacaagggaaaacgacgttgctgcgagatctggcgagacaaattagcagtggtacaaagcttacagggggaactgaactggttcagggaatacgtccgcgtctgaaagtgggcattgtggatgaaaggtccgaaatcgctggtagctacaaaggagtacctggcttcgacgtaggaccccgaacagatgtgatggacggttgtccgaaggctgagggcatgatgatgatgcttcgctccatgtcgcccgatgtcctgattgtggacgagatcggtcgtccggaggatgccgaggcggtgatggaagccctgcatgcaggagtctcagtgattgcgactgcgcatggccgtgacctatcggagctgtcggccagacccgccctcagaaccttaattacggagcagatgtttcaacgttatgtccagctgcaacggacgagccggggcatgacctttcggctggctgatggcaaaatgcgtgggttgcagcagaccggggcaggaggtgaagcctttggttaacatgtttggtgcggtaattattctgttagccagcaccctcgccggattttacaaggccagacagtatgcattaagaccgagacagttgcgagaactcattgcagccctccagcgactaatgacggagattaactatgggctcactccacttcccgatgccatgggcaagatgggagcacagaccaaagaacctgtaaagacgttgtttcttcatgcagctacacagatggaacctcctcatggactcactgcccgggaaagtctgcagtcaggcgtggatctggcgtggggaagatcggccatgaaggctgacgagaaggaagtgatgctgcaattaagcttcagccttggcacaagtgaccgtcaggatcagaccaaacatatatcgttagccattcaacaactaatgcatgaggaatcccgcgcccaggccgatcaaattaaatatgaacgaatgagccgaagcctcgggatgcttgtcggagcgttaatcgtcattctgatcttctgaaatagccgggatagtgaggtgccaaggtcatgaatctagaagtgaacgcaatctttcaaattgcgggtatcggaatcatcatcgccatgattcacacggtactgaaacaaatgggaaaggaagatatggctcactgggtgaccgtaatcggatttgtcgttgtattgttcatggtggtccgtatgctggacagcctgctacaagagatcaaatcgatatttctttttcaatgaaatcggtcatgaagccggatggtggtgacctgtggaaattatccaagttgtaggtttggcgctcatcgcaacagtgcttattctggtcattaaggaacagaaaccgatgtttgcctttctgattgctgccgcaaccggcattgtcatcttcatgttgttgattggcaaaatcggagcagtcatcgaagtgttgaagcggcttgccgagaattcaggcatggaaagtatttatctgaaaacggtgctgaaaattattggcatagcgtacatcgctgaatttggcgcacagattgtcagggatgcaggtcaggagagcattgcgtccaaaatcgaattggctggtaaggtactgatccttgtacttgctataccgatcatcagcattattatcgaaaccgtcatgaagctgatgccggtgtagaaagggcgtgcggacttcatatgaaatcaatgcatcataagccgcagtggcgccttacggttgtgctgatgctctgttttctctttggtatcctgggacaggttactgcaacctcgccttctggtgagtggatggagcagcaggccgatcagcttcccaaggatcaggtggagaaatactgggatcaactgatgcaacaatacggtggtttcttcccggatgggaagaccccttccttcatggatatgttaatccccggcaatgaagggttcagcctgaaatcggtgtttgtagcgataggaaccttcatgctgcatgaaattttatataatggcaaacttctggtcacgattgtgatgttaagtgtactcagcatgattctggaaacacttcagactgcatttgagaaaaataatattagcaaaatcgcctattccatctgttatatggtcatcatcattattgcaatcaacagcttcagtgtggcgattggatacgccaaggatgccataaccggcatgatcaacttcatgatggccatggttcccttgttattcacactgctcgcgtccatgggtaacgtcatcaccgtctccgtgacccatccactcatcattttcatgattcatctggtgagtacgttgattcacttgctggtattcccgttactcttcttctcagctgttctgcatctcgtcagttcattgtctgacaagtacaagctgacacagctcgcagaccttctgcgcaatattagtgtggcactgctgggtatcctgctgacgatgtttttgggtgtaatctcagttcagggagcatcgggatcggtagcggatggagtcagcctaaaggccgccaaatacatcgcaggcaactttgtccctgtcgtgggcagaacatttgcggatgcaacggatacagtaattacagcttctttacttgtcaaaaatgcaattggactcaccggagtgatcatcattttgtttctatgtgcctttccggcactcaagatcctggctcttgccttgatatacaacgtaactggtgccattatgcaaccactaggagacaccccgattgtaggatgcctccaggccatcggtaagagcatgatctacgtatttgcggcgctcgcagccgtcgggctgatgtttttcctggcgattaccatcttgctgaccgcgggcaatctgactgtcatgatgcgctgaatgtatgttggcaagaaagggggtggaaaggatggggtggctgagcaactggctccaggaattgattatgatcgttctgctggcgacttttgtggatatgttgttgcccaatcgatccatggaacgttatgtcaagcttgtgctgagccttctcatcctgctgacccttttatcacccataaccaagctgcttaaaagtgatccggttggcgaactgaaacgggcaatgtctgcaatggatgctccatcgaatgggaatgcgacactcgaacagatattagctcagggcaaacagctgcaatccaatgaacaggaacaatccttacaatggacagccaaagaactggctaatgtcatgaaaggtcagattgaagaaacaacaggagccaaggtgcggtccgtagaggtacagctgaccatgagtaaatatgaaaccgagatggaagctgcctcatcagtcgaactgcctgtgatccagcgtgtgttggtcgagatggccggagagggtgcagaaggagaagtgaaggcagggcagcaagaagtcgctgctaatacacaacccatatttggaacagacacagaagtcgagaaggataaatcacatcaaatacaacagcccatccagatcggtcagattgaagtgcctgatgtacagattgatgtgagtagagggcaacgtgatggaaatgaagcgtcttccgagcctgttatacgtgatcaagcagatgagacgaagcagcaaggtgagacatccacaaggtccgaacatgcagtgcagattattacattgttgactgaaaagtgggatgttgatgcaaacaacgttcaagtgacagaaccaaaaagtgctgaagtgctctgagaaggagggtgtccgatgaaacaatggttcaaaaagatggaaacctggatgggtggcggagagggtggggcaaggcgaagtcaaaccttccgctggctgattatcctgggtttgatcggggtgggaatcatgctgttcaattccttcgtcaatgtcaaaaaaattgattccgaaaatatcggtcgggaaccaccggacccggcaacatccatggcatccatacagagtgatccgtcggaacagaatccttttcaggcgatcgaaattgcatttgaagacaaaatcaaaggtgtgctggaaaacattgttggtgtgggaacggtggatgtgatggttaccgtggattccacagaagaattggtcgttcagcggaacgtgaaggattctcagcaacttaccgaagaaaccgatgctagcgggggcaaacggcatatgacgcaatatacccgtgatggcgagattattacttacgaaatagcaggggatcagacacctatagtgaccaaaaagctcaaaccgcagatccgtggggtgcttgtggttgcgaggggtgcagagaacaaggttgtgaaggacctgataaccgatgctgtggaaaaaggactgaatgtggcagcctaccggatctcggttgtaccgcgcaaacaagactaatctgatgtgttgaatcacaagattcaattctcataagattgaagccaatttgaggaggaagttctaatgaataacaaacgtcaaacggtatggctcgtttccatgctgagtctgatggtcattttgtccgcatattatctgttcactgaggattccggttcagtcaacgcgccggtggctgacagtcaacaagtggatggaatcaagcaaggggaagcaaaggagacggcaggcattcttgatcctacagaaggtttggttgtgaatgaagtggtgaatagcggcgaagttgaaagtgatccaagtgcggctggcgctgtggaagaaccgacggctacggaaggtaaagaagctggaaatacagagaaaacacctgctgttgaaccaggcgagaataagggtgaggcaggcaaagaaaccaacaaagagaccgacaaaggggcaacaactacaccggagacagacggtcaggcaggcggcactgcaaccaagacagatgaggaagtcctcaaggaaatggaagagcagaatacgacagcatctgcgagtagccagttccagaactaccagtggcaacgtgaggaaagcaacaatcgtaagtatgaggaactgatgaccgtggcaggtgatctgagcaaaacgccagaggagaatgccaaagcaaccgagcaactccgtacactggaagaaaaagaagctaaaatcactggcattgaggagacgctctctcaacagtacgctaatgcgatcgttcaagaagattccgacaagtataaagttgtggtcctcagtgacaaactggatgtaaaacaggcggtatccattgtggatctggtcatgaaagaattggcggtttcacagaacaaaatcagcgtgcaatacgtcacagaacagtaatccaaatcatggaaatgcagtcccgggagctggttgtactctcgggctctttccatttttaatgattatgatataatacataaagccatatgaccgtcctagtgagactggcatgatgccgaaggagtgaataatggaaatgtttaaattgagtgaaatcaaagaactgattaaactggtagatgaaagttccgttcaagagttggaaattgaaaatgaaggatcacggttatcaatccgcaaaccgggcaaaacggagtatgttcaagcagctgctgtgcaaccgcaaatgattgctgctccgcaagtacagccggcagcagtggtaagtgaagctgcaccgcaggtcgatactacaagtcatttacataaaattgtatctccgatggtaggtactttttacagagcttcctcgccggaagcgggtccttttgtgagcgctggtgataaagttgttgagaaaacaacggtatgtatcatcgaagctatgaagctgatgaacgagcttgatgcggacatcaagggagaaatcgttgaagtgctggttgagaacggacagctggtcgagtatgggcagccccttttcctggtgaaaccggaataaccgttatagctggttaacagctaaccgcatgagcttcgaaggaggacaaaacgaaatgaaatttcaaaaaatactgattgcgaaccgtggagagattgcggtacgtattattcgtgcctgccgtgaaatcggcatctcaacggtagccgtctattcggaagcggacaaggattctctgcatgttcgtcttgcagatgaggcttattgtatcggaccgacactgtctaaggacagttacctcaacttcacaaacctgatgagtgtagctacgctgacggaatgtgatgcaatccaccctggatacggttttttggcggagaatgctgattttgcggaaatttgtgagtcttgcaatattacgtttattggaccttctcctgaagccatcaccaaaatgggtgacaaggctgttgccaaacagacgatgaaagatgcaggagtacctgttattcctggatcagacggccttgttgaaaatatggatgaagccatcatgattgctagagatatcggatatcctattattatcaaagctactgctggtggcggaggtaagggaattcgtattgccgaagatgaagaaacgctgattaagcagattaccgctgctcagcaggaagcacagaaggcatttggcaatgcaggtgtatatctggagaaattcctgacaggtatgaaacacgtggaaattcagatcattgctgataaacacggaaatgcagcacatttgggagagcgtgattgctcggttcagcgtcgtcgccagaaattggtagaagaagctccgtgtccgattctctccgaagatgtgcgcacactgatgggtgaagctgcggtacgggctgcccttgctgtggattactcgggagcaggtacattggagttcctgctcagcccgaatggcgagttctatttcatggagatgaatacgcgtattcaggtagagcacccggtgactgagatggttactggcgtggatctgatccgtgagatgatctcggtagctgaaggcaacccactctcattccgtcaggaagacgtggttatcaatggctggtccattgaatgtcgtatcaatgcagaagatccggaccgtaactttatgccatcaccaggcaaaatcggattctaccttgcaccgggaggacctggcgttcgtgtagatagtgctgcttatccgggttataccatttcacctttctatgactccatgatcgcaaaattgattgtgtggggagcgaatcgtgaagaggcgattgccaagatgaaacgtgcgcttggggaatttgcgattgaaggcatatctacaactattcctttccatcagaaattgctggagcacccaacgttcattcgtggtgactttgatatcaaatttcttgaggaaaacgagatttaaaaggtatattgggcttgtttgtcataatgtagcccaaatgatatagtatgaataataagagcgcatgtctcctgcaaaggataagcccgcacctcgcggatgtttgcaggagttccggtaaagccggaccggaagggttctgaaggttgattaacctgagtccagcgccctgacggatggccgcaaacttatctcgcgaaaggtgtgttgaacagttatgagtacactaccgactgaatttgaacgaacggatatcggtgaaatccagatcgcacctgaagttattgaagtgattgctggattggcgacccttgaagtgaaaggtgtcgcaggcatgagtggcggattcgctggcggatttgctgaattgcttggtcgcaaaaacctttccaaaggcgttaaagttgaagtgggccaacgtgaagctgcagttgatgtttccgtaattatcgagtacggataccgtctgccacaagtagctacggagattcaacagaacgtgaaacgttccatcgagaacatgacaggattgaatgtgaatgaagtgaatgtgcacattcatgacgttcagttcaagagcaccgagaaagtggaagagatcgacctgaacagtcagcgcgtaaaataaaagaagacagattcccccggcatcatctgccgggggttatcccgtcttggacaggtcttcattatagcgaaagctagatgaggatctgattttttgctagtgaacaggttaagtcatgttagtgagcaagggaggctgtgcagttcgtggctaaaatactggatcggcttctgttgtttatatacagcataagcgttggagcaatatcggcagccgtcattcttctgattagcggtgtgctgccttacgaattgaattaccagcaggaacaaaacgttattgttgcgtcggttattgcagcagcgattttgtttatcctgagtttgcgatttttctacatctcggttcggcgtgagcgtgcatcgttgccgtctgtagatcaacgtactgagtttggtgatgtacagatttcgatggagacgattgagaatctctgtttgaaggcaacttcccgtttccggggagtacgtgatgtcaaggcacgcatacgtgtggttgagtcaggactggagattatgatccgtgcagtagtggatggtgagacacctattcctgcgctgacttctgatctgcaaaaggcgatacatgatcatgtacaagagattacgggcatcccggtttcttttgtcacggtgtatatcgctaatgtaacccagtcgcctaactacaagagtcgagtggaatgaggtgagtttcactgatgctgtggaaagagatttgggatagtcacagaggccgaattaccggaattatcggcggcatcttttttggatttctttatgtatggatcggtttttgggatatgttgttctttgcactcttggtgttcatcggttatacgttaggcagacgaagcgattcgaagctgggttcgtccattccctggagggagtggggacaatggctgggcgatcgctggcgtccgtttaagtgacctacctgaaccctgcaatatgtttcttccgaaaatagagctgtagtttaggttgcccgttttttggaggaaacgtattgcaggtttttttgtgaaaagggataacaataacaataccgtgtaagccatcgatctaaccgatactggataagatgtgatgtttgcatgattttaaaataagcatgatgacgctccagacggagcgctgcaggaggcaggacatgaaaagacgtttggcaagggaaattgcagtacaaagtctgtatcagatggaaatgaatgaggtaggtgcagcagaagctgtgaacatgttgatcaatgaagctgctgaagataatgaaaccgaagtagttattcgcgatgaagatgtaatgcgtacttatgttactgagattgtacaaggagcctggaacaataaggaagccattgacggtttgcttgtggattatttgaaaggttggcagatcagccgtctgtcacgtgtagatcgccagattctacgactgtcaacgtatgaaatggtattccgtgatgacatcccggcaaaggtatcggtcaatgaagcaattgaactgtccaaatattttggtacagaagaatccggtaaattcgtcaatggtgtacttggacgcatgattcaggaagttgacgcgattaaagcaaaattatcttaagttatgattaattatagtgtgtgttcaaaaagaccggttttcagtaaccttcgtaatcaaaagcgggctttttgaacaacctctaaatttatattcacataagggagagagagtacaatgacagcatctattattaacggtaaagaagtatcccaagagatccgcgcaagcatgacaacagaagtaaaacagcttagcgaacagggggtagtacctggtctggctgttgtgctcgtcggggaagatccggcatcccaagtctatgtgcgtaataaagaaaaagcatgtcacgacctcggtttctactccgaagtacatcgcttggatgcagatacgtcccaagaagatctgcttgcgctggtggacaagttgaacaatcaacaatccattaacggaattttggttcaactcccactaccgaagcatatcgaagagaaagcggtcattgatgcaattgccgtggataaagacgtagacggattccatccagtcaatgttggtaatctcgtaattggagacgatagtctgcttccatgtaccccagcgggtgtaattgaactgatcaaacgtactggactggaaatgtccggtaaacatgcagtggttatcggaagaagcaacatcgttggcaaaccggtatcgctgttgctccaacgtgagaatgcgacggtaaccatgtgtcattcccgtacagccaacatgaaagaaattacacgtcaggcggacattttagttgtagccatcggccgtgctaattttgtggatgctgattttgtgaaaccaggtgctgttgttatcgatgtcggcatgaaccgtttggataatggcaaactggcaggagacgttgatttcgagagtgtgaaagaagtttctggtccaattacacccgttcctggcggtgttggtccgatgacaatcacaatgctgatgcaaaatacattgatcgctgccaagcgcgctcacggattggcctagggttttgtctgtggcagatcaaaagatctactccatcaaagacctgaaccgatacatccggatgaaactggaatcggatcaggtcctgtcggacgtctggctgcgcggggagatttcgaatttcacacatcactccagcggccatatgtattttacattgaaggacaaggacagccggatcaagtcaattatgtttgcgtcccataaccagcgattaccctttgtaccgaaggagggtgcaagggttattgcccgtggtaatgtctcggtgtatgaacgggatgggcagtatcaattctatgctacccatatgcagccggacggaattggaagtctgtatctggcttacgaacagctgaagaaaaagcttgaggatgaagggttattttcaccttctcgaaaaagacagatccctcgttatccacagaccatcggggttgtaacttcaccgacgggagcggcggtgcgagacattatgatcacactccagcgcagatacccttctgccaaagttgttttatatcctgttctggttcaaggcaagggtgcagccccttccattgtcaaagcgattggcaacctgaaccggatgggagaagccgatgtacttatcgttggacgcggaggcggttcactggaggagttgtgggcctttaatgaggagattgtggcaagagcaatagttgcttcggatattcctgtcatttctgcggttgggcacgaaacggacttcactattgctgattttgcagccgatttgcgtgcggctacacctacagcagctgctgaattagctgtacctaatcgagctgagttgcttgatcagatcggacaacgtcagcgtcaattacagcatagcttgcgtcagcgtgctgtacataatcgtgaacggctcgcaagattacagcgttcgccagtgctggttcatccaagacgtaccttgatgcagcacacggaacgactggatatgatgcatcaacggcttttgagaacagtcgatacacgtatgaaatggacaggagagaagcaggagcgtctgcgggcagcactgcaacgattcaatcctcgtgagcaggtcaatgtagcacgccgtgagaatgcggcagcacgcagacaactggaacttgcgatcaggtctatagccagatcgaagcagcaacagtggaaatcatctgtgcggcatctggatgcgcttagcccgctcaaagtcatgtcacggggatacagccttgtctatgacgagcaggaacagcgattgatcaagtcaacgaaagatgtacagcctggagattcaattaagattaaattaacagacggacagctggactgtcaggtttggggaatgaaggaggacgacaatacccatggcgaatgaatcggaattgaattttgaagaggcaatggcggcattggaagacatcgtaggtcagctggaacatggtgatgttccgttggaacaggccatcgatctgtttcaacgcgggatgaaactttcgcaactttgcggtcttaagctggaacaagtggaacgcaagatcgagatgatcgtagaagaagatggagagcttcgcaagaagcctttcggaactgctgacgatgagagcggtgaagtccatgagtaatcgtccttcgtttcaagtgtacctcgaagaggtcacagctgcggtgacagaagcgttgaaacacacgcttcccgatcactgggatgtaccccaatcgttgacggatgcgatgcagtactcacttatggccggaggcaaacgccttcgtcctcttctggtcgttgctgcggcggaagccttcggtgcacagcgtacagctgcaatgccggtagcctgcgccgtggagatggttcatacgtattcactgatccacgacgacctgcctgctatggataatgatgattaccgcaggggaaaattaacgaatcataaggtatatggtgaagcaacagccatattggcgggcgatgcgctgttaactcatgctttttatagcattgttcaagctggtcgtcgcagcggtgtagcggcagatgcgttgctgtccatcgtagaggacatgtccgaacttgctggagcaagaggtatggtcggcggtcaagtcgcggatatggaaggcgagcaaggcatgaccgatctttcacagctccaatatatccatttgcacaaaacgggtgatctgattgttttctcactcattgctggagcacgaattggtggagcaacggaaggacaattggaagccttacgtgtgtttggacgtgatctggggctggcgttccagattcaggatgatattctcgacctgacgggtgacgagcagaagatgggcaagaaaacacagagcgatgtgaatcagcagaaggtaacatatccttattttattggcatggaggcttctgtagatgaagtgaaatcccttacccaatctgcaaaagacgcacttgaaagagccgagttacctgatgcatccagattgttggaaattgcagattatctgatgggtcgagaccattagattctgacggagcggtctgtttcaaaaactatgtaaccgtgtaatgaatgtaatgtcctttttccgagtagatggaaagagctgtcccgagtggatgcgggaatacatatggagaagaattttaaataacttgctggcgagaatgctcgttatcgggagtatagtgcagtaaattatgattcttgttcttttatgttataatgatttaatgtcatttgattcataatgtatatatcgatttacaacaataactaaacaatctaggaaagcggggagattctcgtgctgcttccacaaattaaacaacccagtgatctaaagtcgatgtctcaggatgatcttgcccttttgtcggcagagatccggcagtttctgattgagaaactgtctgttacaggtgggcatctcgcacccaacttaggcgtggttgagctcacggtagccctgcattactgttataacagtccagcagacaaaatgatttttgatgtagggcatcaggcttatgtgcataaagtcctgacaggacgtatggatcgctttgatacattgcgtcaacataacggtctgtgcgggtttgtcaaacgcaacgaaagtgaacatgatgtatgggaagctggacacagcagtacttcattgtccgctgcgatggggatggcccttgcacgtgatctgaaaggtgaggacaaccaagtcatcgcgatgattggtgatggagcgcttacaggtggtatggcttttgaggctctcaatcatattggtcatgagcagagaaaactgatggttattctgaatgataatgaaatgtccattgctccaaacgttggagccatgcataaatatttgagcaagattcgttcggatcgtcattatctgaaagcgaaagatgatgtcgagggaatgcttaaaaaaattcctgctattggggatcgtttggccaaatcggcaagctggatcaaagatagtgtcaaatatatgatggtaccaggtgttcttttcgaagaactgggcttcacgtatttgggaccgattgatgggcatgatattccaaaattgattgaaaccttcaaacaggcagataacgttgatggtcctgtgctcgttcacgtgctcacgaccaaaggcaaaggttatcagccagcagaagccgattcgcacaagtggcacgggatttctccgtacaaaattgaatccggtcaagtgctgaaggcagtcggaaaaccgatgtacacggaagtgttcggtcaaacgttaattgatcttgcgaagcaggataagcgggtcgtagcggtaacgccagcaatgcctacaggatcaggtcttattccgttcagtaaggaatttcccgatcgcatgattgacgtagggatcgcagaacagcacgcggcgaccatgtgtgctgcactggctatggaaggtttgaagccggtatttgccgtgtattctacgtttatgcaacgtgcttatgatcagattgtacatgatatttgccgtcataacgccaacgtgatgtttgccattgaccgtgccgggtttgttggtccggatggggaaacacatcaaggggtatacgatgtggcatttatgcgccatattccaaatatcgttctgatgatgccaaaagacgaaaatgaattgcgtcatatgatgaaaacggcgcttgattataatgaaggtccaattgcttaccgttatccacgaaacaatgtggtcggtgtacctttggatgatgtacttgttccgattccaatcggatcatgggagcaactgcgtccatccgagggatatgctgtcatcgcttcaggttcgatggtgcagcttgcagaagaagcagcagagatggtgaagcgggaagggatcacagcaggcgtaatcaacgctcgcttcttgaaacctcttgacgagcaaatgttgcgtgatttagctgttcgaggcaccaaattgattgtacttgaagaaacatcccaggcaggcagcatgggtagtgcagttctggagttttatgcagaacagggactacatgatgttcatgtacaattgatggggattccggatcgcttcatcgagcatggcagtattaaggaacaacgtgaggaagtgggtcttaccgttgaaaatgtatgtgctgaactgcgcaagatggctgttcaatcatcttacggcatacccaaaacacgttttccttcgtaaatttacatgataggagacagacatgtcactcccgaaagaacgaattgatgttctgctggttgagcagggctattatgaaagtcgtgagaaggcaaaagctgcaatcatggctggactggtatatgccaataatgagccgatcgaaaaggcgggcatgaaaattccaagggaagccgagctgaaagttaaaggctcggtacatccctatgtcggcagaggcggattgaagctcgaaaaagcgatccgtcatttcggccttgatatgaacggacttgtcatgctcgacattggttcatccaccggcggatttacggactgtgcacttcagcatggcgcatctcacgtctacgctattgatgtgggttataatcagctcgactggtctttgcgtaatgatgagcgggttaccgttatggaacgaactaatttccgctatgtgactcctgaagatctgacgggacccgtgccgaactttgcgagcattgatgtgtcgttcatttcactgcgaatcatattgccgccacttctggctcttttgaaacaacctgcagatatcgttgcattgattaaacctcaatttgaggcagggcgtgaaaaagtaggcaagtccggtgtagtacgtgatacgaaggtacacaaggatgtattgcagacaatgcttcatttttccagtcaacttggtttacatctgcagagtttaactttttcaccgataacgggtggagaaggtaatatagaatttctcgcacattggcgtctggaagcaccagaggcaacacaaccagagatcgatccagcttcacttgacgcacttgcggagcaagttgcaaaggaagcagctcatacatttacgggaaactcatcataagatgggtttcttttcgctggaaaggtgattgacgtaaagggaaatcattactgaacctcgaatatgtcttcgaggtgagcgataatggatggtcaatatgacacaatctttataggtgtacttgctgtctgtttgatcttgtggctgttctttggcttgcgtaattgggtgaaccgaccgacgccggtaagcttgtctggaatgcaactgaacgtgaagattcaagattccccggccttggatttgcttgaagcacagggctacgaagtcatcggtgggaaaatgaaagtccctctggcttttgaggccaatgaatccgtttattacagcagattattcattgattatgttgcagaacgtgaggatctcagatacctcgtgaaaacgtctcgtcgcagacagccaatcgatatgaccggccctgcgctaagggatcgcttcctcaattatctgttgttatatcctggctgtgaaggattgctatatgttgacgtggaggattccgatattaagttaatcaggctcatggactatcaggaagatgtgtatgatggggatgatctggactaatataaaagaatgaacattgcagggcaaagtctgcggcgaattacaaatgctgctttattgcaatacatctaactggaggcatgtatgaaaggacaaaggcacatcaagattcgtgaaatcattagtcaaaatgaaattgagacccaggatgatctggttgaagcactacgcaaatcaggttttcaggtgactcaggcgacggtatcccgggatatcaaggaacttctgttaatcaagattccgatggatgatggaagatacaagtactctttaccgacagatcaacgatataatccgattcaaaagttgaagcgtgcactcgttgacaacttcttgcacattgatcacacaaacaatctggttgtgatgaaatgtttgccgggaacagccaactccattgcagctttgcttgataatattgagtggaatgaagttatggggacgatctgtggagatgacaccattctgattatctgccggactgaaggtaacagtgtgaccgttattgagcgaatcatgggttatatttcttaaatcaatggttcaaaaacataatttctgagttagtcatccggaggtgtttttgcagatgttagttacgttatcgattcgtaatctggctgtggtggaagaagtggatgttgtattccacccgggattccatgtactttcaggggaaacgggtgcaggtaagtcgattattatagatgcacttggcttaattgccggtggacgcagttcagctgatctgatccggtacggatgtgagaaggcagagatggaagccttgttcgagatggagcagagtcatccggtatggcagacattagagaagctgggtatccattgtgagcctgaagagcatctggttattcgacgtgaactgaacacgcaggggaaaagtacgtcccgcattaatgggcaattggtcaatctgaccatgctacgggaagtaggcgagaagctgatcaatattcatggacaacatgaacatcagagtttgctacgcgctgagagccatctggggcttctcgatacttatggctcggaagtcatcggaccgatcaaagcgaagtaccaggagcgctacagcaagtttatcacggcggaaaaagaactgcgtgcccttcaggagtccagtcagcgggcatatcaactcttggacatgtatcgctttcagcttgaggagatcgcagcagcaagccttacacaaggcgaggatgaattactcggggaagaacgggtcaaactatcccatagtgagaaaatgatggacagtgttgctggtgcatatgatctgctcagtggtcaacgcggacttgaagctgtgagcattgctctttcaagaattgaagacatttctggatatgatagcaaaggactgcaaccaatcgtagaacagctacaatctgcattttatcaattggaagatgcgacatttcagttaagggattaccgggagaagattgaatttaatccggcaaggctggaagaagtggagcaaaggctgaatctgatttctggcctcagacggaaatacggggacagtgttgaacttattctgagttattatgatcagattagccatgaaaccgaccaactggagaacaaggacgaacggctggagaaattgcgagctgaacgtgacaaaatgcttaaccttgtgatggagtctgctgaagagctcagcaaggttcgcaaacaatgcgccgaggaacttgctgcacaggtggaaagcgaactcaaggatctgcaaatggagcggactacactgcgtgttcagattactcctttcgaagatccaaaggggattgaatggaatggacgtcgtattcgtctgaatcgtcatggtgcggacaatgcggaattcctaatctcaccaaacccgggcgagccattacgaccacttggcaaaattgcttcaggtggtgagttgtcgagaatgatgctggcgatgaagagtatctttgcgcgacatgaccggatacctgtgttgatttttgatgaagttgataccggagttagcggtagagcagctcaatccattgcggaaaaactgttccgtttgtcttcgacttgtcaggttttctcaataactcacttaccacaagtggcttgtatggcagatcatcagtatctcattgagaaacatgtctacgatggacggacaatgacgcaggtggaatcgctgtcagacgaaggcagagtgaaggaattggcacgtatgctgggcggcgtggaaattacagaaaaaacgctgcatcacgcacaggaaatgctgaatttggcggaagccaaaaaagggtgaaacggacggctggcgtaatgattgacagtaataaaagcctgggggcgaggttatcttataggtacgcaattggcgaccacctttcgtcaagcgaaagaagcaaagggagtgtgacagccattgaattcccccctcaggaagaaattgctaggtcttttatttgccttctttctttgtgtgattagccaggccattcagcctgtgcaaagttatgcttcactgccggatgaattgcaggtgtttgctggcaggcaagcggatgtccggctcgctgtacctgctgcttcaagcgccgttgtagatcgtcctgatatcgttggtttggatgatcaggcagcgatgcatgttaccaggcaacaacctttgcatcttcaccctcaacagacgggacatgccaaattaacgttgaagttgtggggtaaaattccggtcaaaacagtccatgtgaatgtgataccggatttgcgtgttgtacccgggggacaaacgattggcgtcaaggttaaatcggcaggcattctggtggttggacatcatctggtccgttccggtcaggatgagcgtgtatcgcccggagaaacagcgggcattaagctcggagatctgattacgcatatggatggaaaacgtctggatggcgtagcaggtgtctctgaagccgttgaacttgcagggaaaagtaaaaaaggtattgatgttgtgttaaaacggggcaaggaaacggtgaagacacgattaactccggcgtatgactccgaggatcaagcgtggaggcttggattgtacattcgtgattctgcagccggtgttggcacacttaccttctatgcacccgatcagggcgtatacggtgcactgggccatgtcattacagatatgaacacacaaacatctattgttgtaggtagtggtcagatcgttcaatccaatgtgacgtccatttctaaaagtgagaccggtgatccgggtgaaaaacgtgctcatttcctcaaggaaagcaaaattttgggcaatattgaacgtaatacggcttttggtatctttggtaaaatgtccggaaatcctgagcacagtttgtattcgaaaggcattcccgtcgctttttctcatgaagtaaaggaaggaccggccgaaatacttaccgtggttgacggtcaacaagttgaacgcttctccattgacattgttcatgtggcagatcaaactgaaccagcaacaaaaggtctggtacttcgaattacggacccgaaactgctggataagaccggaggtatcgttcaagggatgagtggcagccccattgttcaaaatggtaaattgatcggtgcagttactcatgtattcgtgaatgatccaaaatcgggttacggttgcttcattgaatggatgttacaagatgctggcgttatgatgaaaaaggaaaacgataagaacctcaaggctggctaaacagccctgaggttcttttttgtcgaaagcaaacataatatatcggataatgaaataaattatttattatataggatcaagaaaaaaaaataaagaaaaataattttcgacaggaggaatttaactggctgtgtcgaaaattaaacgtgtaaggaaatgtacgaaacgatgtttaatttaaaggaggataccgttttgcaaaaaattgaggtattgctggccgatgataatcgtgaatttacgaatttgcttgccgaatatatatctgagcaggaagatatggaagtaaccggtattgcatacaatggagaagaagtactgcaattgctggagcaaactcgggatgtgccggatgtattgattctggatattatcatgcctcacctggacggactgggtgtgctagagcgcttgcgcgacctgaacctgtctccacagcctaaagtcattatgcttacggcattcggacaagagaatatcacacagcgtgccgtgcaactcggagcttcttattatattcttaagccgtttgacatggaagtgcttgcgaatcgtgtgcgtcaactggtgggaacacagacggcgatgtccacaagcagcggatcatccatgttcatgaaatcatccaatgttgtgccaatgggcaaacacaaaaatctggatgcaaatattacgtccatcatacatgaaatcggcgttcctgcgcatattaaaggatatcagtatttgcgcgaagcgattacgatggtgtataacaatatcgaaattttgggagccatcaccaaaacactgtatccggcgattgccgaaaaattcaaaaccacgccgtcccgcgtcgaacgtgccatccgccatgccattgaagtggcttggacacgcggcaacatcgacagcatcagccacctgtttggttacacaatcaacatcagcaagtcgaagccgacaaactcggaattcattgcgatggttgctgataagcttagaattgagcataaggtaagctgaaagggtcaggagtagtgagttggctagtattagtttggattcaggataggttctagccaaatgaattttggcggcctatatctgaactcgttcatttcatgccgataaacttctgtaatatatgccaacgaataccgcttatttattgggtcatccaagaccaataaataagcggtattttttatgaccaattttgaatttaaactggataacttattgttgtattgttcttccaaaaatcttgcacgtaaaacattggcaagttatgagcagacgttgaagctgttcgataagtatttagcgaagtgcagtttgtagcaattgtccactaaaaggggaaatgcaacgaggagatgatgtcagtcttactatactatttaagagatataagagaaaaaacatgagagaacgactgtatagggtaccccctttcggttcaccccaagatttgagctggagagtatatttgggcaaaacaagaataatcgggattttcgaagattcccgctttgtggctttcaaaagtaagtctggaggtcgggagctttgccatgcccacaacttgcttaaaaagccgcaatggctgaaaaacgcaaaagggacaaagagggataaacctctgcttagtcccttttgaacgtgttggtattaatttttttcactaatatgctttctcaagagtttttgagacagtttattttagtcgcagaattattcttctacgttatatttataaaaattagatgatatattagtcgtagaatacttacacatggtgtgaaatcatttcatagaacactaaaggatggggggaatcaatgaatgaaataaatgagtttttagtatggatgcaaaatgagggcaaagacgggaagacaattcaagcatataagactactatttataatagaggggcttctggatggggcagtttgaacggcacagtaaaacatgggctgaaaaaatccggagaaaattttttctgaaatttgattctgtgaaaaatataaagacagtagtatattgtctaatagaatctgaatggagtacatttaaaagtcctaaagtaaaaaaagaggttcatgtggaagaattattaatgcaaatggaaaacaaactggacatctctacctttttattgataggagaatgtccagtaaggcttactagatttttaaagaatagctttttaagactcgtttaacaaataattatttgctatactcaaactgttagtgcgtcatcgctcttctttttttctgcttcttcaacaagtttttgctcaataagcccgatgaataatttatcgtagtcctcagaacttgtgacttttttgaagccccctgttaaaggtaccacttcatcgcgatttattatttgttcaaatataccttcaaccaaagttctagcttcactatagttgttttcttcatctgcttgtccacctaaaatttgataaatcaccttcgtttttttatcgtttgagacatctccaattccgatagctttttcaaagtgagttattgaacaaaaaattctaatgttatcactgtgtttagaattatatattttcttgcaattagtcaattgacctttaagagtaactgaagaatgcttatcatggttatctacatcatgtagcacatcgtaagaagaattaaattgattgagaactttcattatagtaacaatggtagccttacctctagcacgaataatatgaatgttagtgtttctttctttagcaagatgcttgaaagcaatatattcagtatcaccttccacaattactactctatcagcaaaaaagaattcattcacataagagtctacataatttaggattttcatgtttgctatatcattatcgtcaaattgttcactttcagacttatacaactggatagcttctttttcaccaactctaaaaacttgaatcgaggtgtgtctttccgataaatctataagtatcggagaatgagttgagatcattaatggcatttttttgcctatctgatagagggaacgacttaatgcccgaactgcttcgggatgcaaaaatgcttctggctcatctataagcaataatttattatcattttcaccgagaagttttttctctatcatattttgtatgaggtatattaggctcattctttgaagtccagtaccttggttagctaagggcattttggattgtttattgctatcaatatgaacacttgaatttgtggacttcaataagtctgctgatgaaaatccttcactttcgccgcctattacatttagcgataggtggtcattagagaatagtattcttagattactggaaacatcgttacttacctgtgatagtatactgtccgtgttttgtttgattttttttaaaaatgcaggataggctttttttaggcttgaatactcttgggctaatgtaaaggcatctttatcttcttctacatctccgttaaaatcttcgagttttaggagatcatttttaattatttcagagtatatatcttgaataaggtcgtttatgtcatcaggtagcatggagggagttatgtaaaaaggcttattgtttaagattttctccaatttagcaaataattcgtgcgtttttttgatttctttgcccttctcatcacaaaaacttggggcactttcttctttgtacttctttttaataattatctggtcttcatcagattcaaatacagcttctagagttatatctgttctgcgtactgagaaacagtcattcgggatagtttttgctttagtctccttttggaaaaaacaattgatggcttctaaaatagttgactttcctgtattgtttcttccagttagaataacaatagaatcatttgagaagtcaattgaaaatttttctttaaagaccttgtagtttgtcacactgaatttaaccaatctcatattattcctcctccataagcaataagtattatgacgaattttttcaatttaaaggtctaaagacctatttgaaaaacttacttccataatcatacaataatatgtaggaatttggtattgtttttgtataatattgatagaatttaaaccttagtggggtgcttttgtcttaggtgattttgcccttaaatcttcttgctgaaacccgataaatatcctggttttagtggtctatttctatatttgaagtaatcccatagacattaaacactaaagagcctaaacccttcgtatacaagggtggctgcaacatcgacaacatcagccacttgtttggttacacgatcaacatcagcaagtcgaagccgacaaattcggaattcatcgcgatggtcgctgacaagctgagaattgagcataaggtaagctgaaagggtcaggagtagtgagctggcaagtatagtttggattcaaatttgattctagcatggatttttggcggcctatatctgaattcgttcatttcaatatatgctaacgaataccgtcatttattggattaaagatatccagtaaatgacggtatttttgcataacgaaataacacagaacatgatgatggaatttagtgttgcatcattgtttctgaattttgagatcaagcattaaaataagctccctatagcaaaatttagaaaaggaaatatttcataaacttttaccctcagttaacgctttttcaagtagaaagtggtacgatgtgaccattgacaaagacctacatatatatttgaaaagttcggatagatgctacgaacagaggagtagaatagtatgtttacgcaaataggcgagattgctgaaccaattcctgtagtacaatctgatacaaaatgtgatatcgtctatcatcttttcaagtccaatcctagtctggaaggtatagctgttatgggggagaagggtgtgtcattaatgatgcggccccgattctttcagcagattggcacccagtatggctataatctgtatatgggacgtcctgtagaactggtgatgaacacgcaggcactggtcgtggattattcggaacagattacagatgtcagtgttctagccatggaccgagatgaaggggaaatatatgatcttgtgttggtcacgtcaggagaaagtttctttggagctgtgagtattcggcgtttgctacttgctgttgctgatgtacgggctgaaatggcgatttttatgaacccgctgactggtcttcctggtaatcatatcatagatgaaaggctgtctcaggctcttcagatggaccaatttagcgtactctatgttgatctcgatcaattcaaatcctacaatgatagctacggcttcaaaatgggggatcagcttattcaggcgacagctaacttgcttcgcaagctatttgttctccctgaagcttttcttggacatatcggtggtgatgattttattacgatcctgaatcaccatgattacaaatatattagtgaggaagtcatctcaggttttgaggaaatgaaaaagacattttacaacgaacatgattggcatcatcaatatgttctgggggaaggacgttccgggctaaatcggcccattcctctggtgtcggtatccatcgccgttgtaaccaatagcaagcgaaaatatgaaaacatagatcagattattgatgaggccacacgcatcaaaaaaggttgtaaagcgattgctggaagtatcatctgtgcaaatgataccgccacgacttcgtgctagacataaaatttcgagaacgtagaggacagagagaacctgagatgtgggtctctaaaagctttctgtaagaaagcttcttcggaagctgaggcttcgcctctatacccataacgttaaaatacagaaaaaccgctacttatcaggagttagtcacctgtaatagcggttctatcattggatgcgagtcaaaggttgtgtagcaaacgagccactttaatctttaagctcattatgtatacataaaattatgtttgatcaatgcgtactcagattcgaatatcgacagatggatatgaagcagcaggagatgtagaagccgtagtttgcggaccatttcctgattcctgatctgtggttccaccatctgaagggtgttccttatttcccgttttctttccttcatttacttcctgatcttcttctccagatgttgcagagataggtggttgtactccttttataggtgcgggctgatggatctcttccaccagttccccaatcttctgattgaccttatttaactgggagttgatgtcctggacggtctctcgctttgcctgaaagacggtgcgttctgaattttccaacatcattgatttgcctagatcgagatcatttgcgggaggattgatctccagaacaagtcggtcgaagcgggtttctccttcggtggtctgaatggagccctgcatgcgatcacgcaaaccgaccagcttacccaattgatcataagtctgactatgcttgatcaggtgatcgagtgaaggggcttgtgcctcgtcggttggtttgggttgttgctgttgagccttttcgggctgtcttaatttgttcttttcttgcaattcttcagctttaatttgggcaatctggctgtcgatctgggaaatggagcttgttagggatttgattcgctgagctttggttttggtatccaactcgtcattggtttttacaccttgcatttcttcattgagccggatcttctgctgcatgagtccctgaatttctttatcccgattggagacttgattcccgggagtgaaactgcttttggttgcagatgagattgaattcatatcctctgttctccttctccgctttatcatggttctatttacatatatcggatgttaagagaaggatttgaatagctcttttttcttctgaatggattcattgagatcggttgtattgcgtacttcatcataataattgataatggttatcaataagtgagtggaagttcagacacaatctatgtagacggagatgggttagcaaaatgtggaatgattattatatcctctggaactatgctgcggtgagtataacagatatccgttacatggaattagaggcatatgaagagatgaaatacaaatttcccacaagtacctttgtactcaccattcagggtgatgctggagtgacgattgacaatcaaacgtatgaagtgagtcgcttttatattctccatgggggaaaagggagtaagttggtgattcaagcaggcgaatccggattgcgcttatattacttgatgtacaaagcaaacctgcctagtggagggagaaacgatctgggaaggttaatggagcgtatcaatccgttccaaatgaactatggctttacccccgatatgccaaccattctatatgagcaattgaaacagatgcactttttgtgggatcaaaagaaccctattcagcactttcaggccaagagtttgttctatgcatttgtggagcagatctcatcacagattcctcgtatatctaatcgttatccaagtattattgatcaggtcagcaaagtcattgaaattgtagagtcttcctacacccagccacttacacttcatgttttggcagaaatgattggcaccagcccaagaagtttgtcacgcaagttcaaacagtcgactggaaccagtccgatcgattatctgcttcagtttcgtttgttcaaagctaaggagatgctgctgcaaacggacgccacgttggatgagattgcagccggcatcggttatccggatggatattatttgggacgtatgttcaagaaacatacaggtctttctcctttgcaattcaaagaaaagacctcagcacccctatattggcctgatctgacattaggcatggcgcgaaatgacattttcagaggtggaagtggaaggtatgtttatactgatggtgataatcattatcaatataagcatggagggtcaataaatatgaacagacagacaagaacgggaatgctacttagtattctattaagtcttacattactgttaagtgcctgctctacaggtgttgccagtaattcgagcggggatgcttccggaagcaatagtacgtcaagttctacgaagacagtaacagctgagaatcaaagcaaaacatcggaaccacgtacaatctcaacggttaagggagatattacaatcccggctgaacctaaacggattgtggttgacttgtatctgggaagtctaatcgcccttgggatcaagcctgtgggtacacccgagatgaacctgaagaatccttattttatcaaatcacttgagggtgtgcagaatattggtgaatatgaaaccatctctctcgaaaaggtgttggagcttgaaccggatctcattgtgacaggtaatcctgatttatttgattcctttagcaagattgcacctaccttggttgtaccttatggtgaattgaaaaacacccacgaagaaattgcctatttcggtgaagtgttaaataaagaaaaagaatctgaggcatggttagccgattatgacacaagaattgcagatgccaagaaacgtgttggtgaggcaattgatccgcaggccgaggtgtcggtcatgcagttctatgataaagcaccgttggcctttggtgataattttggtcggggaggtcaggcagtctacagcgcgcttggtttgaatcctcctgcagataaagaagagatcttaatgcaggatcaactggttgaagtttcatcggaagcgattcctgaatttgccggagactacatcattctaacagcagataatctgaccctggaagagttgaaatcgaaaccggtctggagttcattggatgcggttaaaaatgatcgtgtgtttatctggagcccggatcgttcatggtactttgacccgattgcaacactggatcaaacagaggaattggccgcgtggtttacgaagatatctgaaccaaattaagtctaacaagtgattgatgaggtgaaatccaattccactctaaatttcagttgataatgaaaattattatcatttataataaaggtacattagtgaacctctgctacgcatatgttatcggatgtgtggcagaatgatgacctcgtaaggcctttgttccgggtgaggttgggattggagagtattcgatgcaattagacgaacagatgaaatgctggaatcatgccgctgttaaggttctggatatacgccgaatcgttatggaggcaggggcacaactgagttccttcacacttccggcaaatggttttatatatacgattcgaggatcggctgtgcttcagttggatggacaaacatacaaggcagagcggttctacatgcttcatggggccaaaggatcttcactggatatccaaaccaacgaagatttcgaatatattctgctctattacagagcattccttgcctttcctggttatcgtaaaaagtggttattggcacagccggaagttgcaccgttctctttgcaatatggatttgcaccgagtagtccgctggggttattacgttaccttgatgagcttgagggtgcatggattcaatctgggagtctggatctgcttcataccaaaagtttattttaccaattcattcatgaaatgatggttcaattggcagagcaggcgatcaaaacagagcttgctgacccggtgaaacaaacacttcgttatatacagaatcattatagggaacaggtcacgcttgatttcctggctgaacagtttaactacagctcccgacatttatccatgcaattcaaacgacagacgggttacagtccgattgattatttaattcagactcgaatcgccaaggctcgaaatctgcttttgcgatctgatgcaacgctgagtgaaattgcagcagaagtgggttattcggatgtgtattattttagtcgtatcttcaaaaaacatgtgggaatctctccgattcagtatcaacgaaagataagagaagaagcgagagcagaggatcgtccattggtaatctctgaatcgtccattggccgaagatggaagtcgggatatattgattatgagaatcattatcaatatatagacggagggtctacaccaatgaaaagaagaaaaacaagttccagtatgattatggttgcattattgagcataacgatgctcctcgcagcctgctcttcaggtacagcaacaacaccagcagctggcgaaggaacgggtgccagttccaataacagcagtacggcagtatcatcagacacaggaagccagacgaacaaagacaatgaaacacgcacggtctcaacggttaagggtgacgtagttgttccagcaaatcctaaacgggttgttgtactatatctccagggagacgtcgttgcgcttggaattaagccaattgctacatctgaagtattcaacggggctgcctacaagagtgagcttgaaggtgtaaattcactaggtacctggttcgaaccgaatcctgaagctgtcattgatcttgatccggatctgatcattgttccttcagaagagacgtatacgttgttaaaagatatcgcacctacggtatatattccatacgagaaaatgacaacagaagaaagactccagagtatagcgagtatttttggcaaagaacaggaagctgagacattaatcaataatctcaatagcaaagtcgaagagagtaagcaaacactagcagacgcaggcatattggacaaaacggtttccattgtggagggcggtttgaaaggtatggtcgttgtagagagcaagcaatatggccgaggatctcaggcattatatgaatacttggggatgaaagcacctgaagtggtacaaaagaaaattgatgtggtttcggaagcgggaggctccaatttatccatggaagtactgcctgagtatatcggggactacgtgtttcgttcggtgtatgaaggggcagataaccttacggatgatccaatatggagtagcatcccggctgttaaagaaggtcgcctaattgagattgattttgatttcttctactattcggatatctattcaattaataaacaacttgattttgtcgttgaaaagttgttggcggctccaagagcgcaatagtaaagagcagatgtgttcgtagaatttttgtacaagaaatgtttgttttttagccattgtattttgataagattaccattacactaggatttaagtgataatgagaatcgatatcaaatactcgatgttctggatcgaattaacggaggtatttttaatatgaatcagcagttggaactttatgatgtaaccattatcggcggtggccctgcgggcatgtactctgccttttatagcggcatgcgggatatgaagaccaagttgattgaggcacgtgacagattgggaggtcgcatgctcttttatccggagaaaatgatctgggatgtcgggggtgtgacgccaattctgtgtgaagatctgatcaaacaattggaagaacaggcaaggacttttgagccaaccctcgtatttgaacaacagatcgaaggattcgagcgtcaacctgatggcacaattctgttaacttctgcaacaggtgagcaacactggacacgtaccgtcattatggcaatcggatatggtatatataaaatggccaagctggagcttgaaggtgcagaccgctatgaggttagcaatctgcactatactgtgcaggaactagagccattccgtggtaaacgtgtgctaatctcgggtggaggcgactctgctgtggactgggcgaatgaactggaagcactggcagagcaagttacggttgtgcatcgtcgtgaccgctttggcgggttggagcgtaatgtactgcgtatgagagaatcctctgtagatgtccgtacaccttacgcggtagagacattgcatagtaagagtggtgatgtgattgaacaggtgaccatctcacacgtggacacaggtgaaactgaactgcttgaagtcgatgctgtcattgtaaaccatggcatgaagagtgactttggtccaatccgggattggggacttgatcttggcgaatggcatgtcactacaacagagagattgcaaaccaatattcccggcgtgtttggcgcaggcgattttgtagattatggtagcaaactgtacctgattgcgggtactttcacagatgcagccctagcggtaaacagtgcgaagctatacatggaccctgaagcggaaaaagtggcttatgtttcttcccataacagtcgctttaaagagaaaaataaagcccttggcgttgtagaagaataaaggtcttcgatcggttatattaagatgacttcgggttcattcgaggccaatgaaaaagtcaacatctataaacagatatccctcctcatttttttaggagggatatttttttcctgtataattaaatgattaatttcaggtggtatctcggatgatttcaaaccaacaatctcttaaccttagtgcatttatggacatatacgatatcatcgtacctaaagataatatgcttcgtcaaatcaatgatctcgtagatttttcatttgttcaggtagaattgcagcatagatactgcctcgacaatggtcgcaatgcagtgcctcccattcgaatgttcaaatacctattgttgaaatccattttcgatgtatccgatgcggatgttgtggaacgttctaaatatgacatgtcctttaagtactttttagatatggcgcctgaagatgaagtcattaatcctagttcactaacgaagtttcgcaagcttcgcttgaaagatgtgaacctcctcgacatactaattcaaaagaccatgaagatcgcgttggagaaagaaattatcaaaagcagcgcaattattgtggatgccacccatacgaaagcgcgatttaatcagctatcacccaaagaaatattaatgcaaaagtctaagttgttgagaaaatccgtttacaagatcgatgaaaaaatgaaggataaattcccaccgaaaacaacgacgaacgaattatctgatgaactggactattgccaaaaagttgtagatgcagtagaaaaagaagaatccctccgtgaatacccaaaggtgaaagaaaagctgaactacttaaaagaaatcatagctgatcaccatgagcactttcaactcagcaatgatccagatgcacgaataggtcacaaaacggcagactcctcgttcttcggttacaaaacacattttgctatgaatggagaacgaattattacagctgcggtaattacgactggtgagaaaagtgatggaaaacaactccaaactctcattgaaaaaagtcgtgacacaggtatgaagatcgataccgtcattggagatactgcctattctgaaaaagataatattcaatatgccaatcacaacgaactacaattaatatcaaaattaaaccctaatatcacacaaggaactcgtaaaaaagaagatgaatttgagtttaataaagatgcatgtatgtacgtttgtaaagctggacatatggcgattcaaagagcgcgcacaggtaagaaaggtatgaataataaccaaaagaatacctacatgtttgacattgaaaaatgcaaagtatgcccaatgaaagacgggtgctataaagaaggtgcgaaaagtaaaacctattctgtaaccatcaaatcgaccgaacataaggaacatgaggcatttcaaagtagcgatagtttcaaagaaaaatcgaaagaacgttataaaattgaagcgaaaaatagcgaactcaagcacagacacgggtatgatgttgcatcgtcctcgggtcttgttggcatgcaaatgcaaggtgccatggccatatttactgttaatctcaagcgaatcattacactcatggaagactcaaagtaaaaggatagagaaaaaggctatattccgttccaatgtgaacgaaatatagcctttttgatttaaaatgaatcttaacaaattaaaatcgtaagtttttcagtggcctcggttcattccgaagtcatctttttgcataaaatgggtaataagaaggcataatggcacaagatagaacacgcttagaattgaacatgaaccaccaaatgtctataataaggctgataaactgtagaatgacactatataagttgaaataatcatttacacgataacggagaggacagaaaaaatctgaaaaagcgaagcggtcgcctttatcaccggattttcccttaagaaaaagggagtcgaaaaaatctggggataacagcgattggaagattgttctgtcatcgtagtgtcagtgtaaataaactttaattcaacttatatagatacaataactagatcagagtggagtgcagcgtatgaaaaagggatcacagccacaacgaggcttcaccttcatccagcggtggttcaaacgatctgataaaaaaaagatcaaatggtctgaaatgtatctcgcacttgcaggtgcgcttcatcgcttgttggttgaagggcggcgtgaacgctcagcagccaaacggctgcatcaggacttgcctattaacgtgttgggcgagatgaagctagagccaggggatattgtgtacacgccaagctcggaatcgacgtattacgctgggcatatgggcattatcggtctcgacggcaaggtgtatcatgtgcacccttatgggcctgtatttgctgattcattagagtggtatctcacgcggttttatgaaggtgatcgcttcattgtattccgttccagattgaatgaggcaggaatgaaagcagccgggtgggtacatgaccattacaagcaggtaaaatgctaccgtttgcagaccaatctgcgcagtattgagcgcaattactgctccaagtttatatatcaggcctatcagttcacatcgggactggatctgtggagccgcaaatttacccgaatgaatcaggggtatatctatccatttcgaattgagcgttcatcagagctggacgttctgggaactttttataaataaggctggaaccgactaaaatactgttcttccgaaaaaaaggagagcaggttctgtcggttttttttatatgtgtagagattaaaaacaggaaaaacgcccaaaacgtcgaatagattatgagataggcacgcacaacttggaatcgtatacataaaaaaaggcgagataatttttagcccagagtaaaaaaatgactacgaagtagacgaacaagaaagagtgaagcgagatgaaatggccgggtttcttacaacgattccgaccgaacaaaaacgtggttaagctatcggactatatcccaaaaaaggaaaggaggcactactgttccatatgcaagaaaaacgttaaatcggtcgtgcattatgcggcgccacagggaaatgtttcaggtgtatgcagttcttgtaagtctttggcggatgaacgtggaatgtttcccatttaataagaagagatgcgctcaggaaataagatttttttgatttatgcgcgtttttgtagtacattagcaaatgtattcgaaggaggattctaatgtactcaggtagacaagacgatactttatacatcatgacctacaccttaaacagcggtatcaagggtacggttccactgtctaataagcagattattgagtggctggattgctacagaaatgagaagcgcttcgtgaccgaaatcggcaaggagttttttggattgaatgcaggattggtagcagactttaaggttcaaaatcatttatcggattatcagcagaccattatgcctacacagcagcaggataacctggaacgcttgtccagtgcttataaatcaaccgagttattaatgaagattgattgtaaatgtggcacggcttatgtgacggaatctccatacaagcgcacaaaatggtactgtacaaagtgtaaagaaattgtatttttggatgccaaaaaaggaatggtggaaacgtcgcgtggtgacgcttactacatgaccaacaaatattttgtttcccgtgactagcgggaagtgactctggaagcatcgctgcgaagcggtgcttttttgttcgaatgtttgctctataacaaaaaaagccccaaggggcctttttggaagatatctagatcgatcttttaggaattatgatgagcattcaactttgtgaggaggaatgaagcagcaacgacagcgtggctcgtaagcttctgaatcgccaatcatgacaaccggacccaaggtaacaggctccccattgacgatacgttgcgtaaaggctgcatccgggctgccacataccgcacagaaagccgagagtttctcaatgtcgtctgccatggcaagcaaaccaccgacatatccgaattccttaccacggtaatccatattaagtccgtccacaatgacatgtttgccacaatacgctaactccgagacaagttccataatggcactgctgaaaaattgtacttcatcaaatgcaacaacatcagcatctatggtttggttcaagatcatttctacagattccggggttaattgccggggaatggaatgggcagggagtcgataaccaattcggcttacgatctcgtcctgggcaaaccgattatcctcggctggtttgtaggccacaacctttttacggccaaattgtattaatttctgacaacggcgaatgagttcaccggatttttcactgaacatgggtccagtaattacggtaatacgtcctgtttgcacggtgctgctactcctctcacatacgggattcaacaaaaaaagcgacctttacagagtaccacaaaatctttggaaagagccagaactaatctgcgcagctttgtgttactatatggattgttaaggtattggttacggcagctagttaacaggagttgtgaaaagaggtgtttagtatgagtgaagcattaacatcacttcaagagcgatatgaaagcctgaaaaaacagggatctctagatgaagcggcgcaggcattatttgcagaactgttcgcagaagcggagagactgcaggcaagtaaccttaccttgcgtagaacgatcttgaagtcttcttccaaagaatcacgtatgtctaccaaactgcgggatgccttatacgaatgacccggagattactccgggtcctcttctgtctttaatttgcgagggaacagaatacctgctgtaattctggcaatcatggcaaaggtgagaccaatgcctgcaaacatgtagattacggtaaaggctttgctgaatccggtggttggcacaaattcaggatgtcccaccgtagtcagggtaaccgcacaaaagtataacgcatcgatccagtgtaggccttcaacacgagtgtaaaataaagtgcctgacagcaacgttgctgccgttaacgcgaacagagccagaaacttggggtctttgaacgcatggaaaatgcctttgagcaatcgttgtaacgtgattagaaatgataccatgatgatccatcctgtctatgtgaagtaggcggtgtgttgtataaacacacaaaaagcccggactcatggggtccttccgggcgtctctgctttttcgggtacacttttggaccggaaacggggacctacataattacgcttgcggtcacggaacaggatccagcctcccagaaaactcatacctgcggcaaaaaggacaagtccaccgccaaaggaaagccactggaaccctggtgaaatcagttcgttcccgtgctcggcataatataggaacagggcatctttcatcatcagaaaacccttcattgccattaaaccggggatgaccaggacaactattgccaaaaatcgcgcaaagaccaatcttgtattcatgagcattataccctttctgccaaagtcgacattaaataaaggttacgcttacagatcatacctgattccatcatagcttggaatgcataggctgtccatgtgtgattggttcaaactttgagttgaccgctcaaggagagtacaatggcatatagagggtataagccaaaccatgatttaagccatcataaattatattgaaatttgattcatagaggagagcatgagagatgccaattacatgtgatgttgcaattcttggaggaggaactggtggatatgtagccgcgatccgggctgcacagctgggaaaacaggtcgttattattgagaaggacaagcttggtggtacctgtctgcatcgtggctgtattccgagtaaggctttgctgaaaagtgcggaagtatacgccgagatccaggagagcgagacgtatggtatcgagacagctggagctacacttgtatttcccaaagtacaggcgcgcaaggatgcaattgtcgaacagctccatcagggcgttcagtatttgatgaaaaaaaataaaatccaggttgtacacgcgaaaggtcgcgtcatcggaccatccatcttctcaccgcagagcggagcagtcgctgtggagtttgaagatggagagatggatacggtagttccaaccaatctcatcattgccactggttcgcgtcctcgtgtgctgccgggcctggaaccggacggcaagtttattatgagcagcgacgaagccctgcgtatggatgaacttcctgcatcactcatcattgccggtgggggtgtgattggactggagtgggcatccatgttgaatgactttggcgtagatatcacagtagtagaagcagctgctcacgtgttgcctgccgaggatgaggatgttgccagagaaatgcagcgattgctcggcaaacgaggtgtccgtttcctgacaggtgccaccgttctaaccgaaacatataacacggatcaagagggcattcagattgatgtgcagcttggtgaagataagcaggaaacgctaagagcggagaaaatgctcgtatcggttggacgtcaagctaatgtcgaaaatatcggactcgaaaatacagatatcaaactggagcgtggattcatcgctgtgaacaaacagttacagaccggtgaaggtcacatctacgccattggtgactgcatcggcggtttgcagcttgcacatgccgcaagtcatgaaggcattctcgctgtcgaacatctggcgggcgaaacggtacatgccgtagaatcccatcgcatcccgcgctgtgtgtacacacgcccggaagcagcaagcatcggattcaccgagcgtgaagccaaagaacgtggctatgacatcaaaacaggcaagttcccattttcggccattggcaaatcgcttattcacggaagtcgggatggattcgtgaaggtgatcgcagatgccaagacgaatgatatattgggggtacatatgattggcacccatgtgacggaattgatcgctgaggcttctctggctcagatgctggatgccacaccttgggaagttggacaaaccattcatccgcacccttctctgtcggaaattatgggtgaagccatgttggcggtcgatggaaaggccattggaatgtaagccaaacaagcttatgagaaaggtcctttccttttttgggtaaaagggattataataaggttaagccaagtcttagtaccaggttataagatcgggtagtaagagtggcacaggctctgattaaaaggaggtacctcatatgagttcacaaggtactgcagacgcggtccaccggcatcaacagctgggacttagcgatggtgaagtattggatatgtacaaatacatgctgctcgcgcgcaagtttgacgagcgttgcttgctcttgcaacgggctggcaaaattaactttcacgtatccggtgtaggacaggaagctgcgcaagtaggcgctgcttttggtctggatcgggatcacgattattatttaccttattaccgcgattacggttttgtactggcggtaggcatgactccgcgtgagttgatgctgtctgcttttgcgaaggcagaagatccgaatagtggcggtcggcaaatgcccggtcacttcggtcacaaaaagctgcggattgtgacgggttccagcccagttacaacacaggttccgcacgctgttggatttgcactggctgccaaaatgaagaagcaagaatttgtttcttttgttacgtttggcgaaggatcaagtaatcagggtgacttccatgagggagccaactttgcaggtgtgcataaattgcctgtcattattatgtgtgagaacaatcaatatgcaatttcggtaccgattcacaaacagttgagcggcaaaatatccgatcgagcacaaggatatgggttccccggactgcgtgtagatggtaacgatgcattagaagtatatgctgcagtgaaggaagcgcgtcgccgtgccatagccggagaaggcccgtcactgattgaagcgatgatgtatcggttgtcacctcattccacctccgataatgatctggcttaccggaccaaagaggaagttgaggagaactggaagaaagatggcgttcctcgcatgaagaactacttgatcgattgtggcatctgggacgaagcccgggatgcggatctggcttcccagcttgcgctggaaatgaaagaagcaactgaatatgcagacaacgcgccatatcctaaacctgaggacactctgacgcacgtttatgcggacagcgaagaagggggacggtaagtatggcagtgatggaatatattgatgcaatccgtctggcgatgaaagaagagatggaacgggatgaaaatgtgtttatccttggtgaagacgtaggtctcaaaggtggcgtgtttaccacaactaaagggctgcaagatcagtttggcgaaatgagagtgatggacacaccattgtctgaatccgctattgcaggtgttgccattggtgcagcgatgtatggcatgaagccaattgccgaaatgcaatattcggacttcatgttgccggcaaccaaccagatcattagtgaagcggcgaagatccgctatcgttccaacaatgactggagctgtccgattgttatccgtgcgccgattggtggcgggatcttcggtgggttgtatcactcccaatgtccggaatcgattttctttggtacacctggtctgaaaattatagctccctactcggcatacgatgcgaagggactgctcaaggccgctattcgcgacccggacccggtactcttttttgaaaataaaaaatgctacaaacttatcaaggaagatgtgcctgaagatgattacatcgttccgattggtaaagccaacgtacttcgtgagggtgcggatattacggtgatcggttacagtcagccgctacattttgtcatgcaggctgctgaggagctggagcgtgaagaaggcattacagcacacgttctcgatctgcgcacattgcaaccgttggatcgtgaagcgattattgcttccgctcgtctgacaggcaaagtgctgatcgtacacgaagataacaaaacgggtggtgtaggtgccgaagttgccgcgattattagtgaggaatgtctatttgaactggatgcaccgattcagcgtctctgcggacctgatgtgccggccatgccaattagcccaacattggagaaattctacatgctgagcaaagacaaagccaaagcagcaatgcgtacacttgccgagttttaatttcgttttttggatcgtttaaaagtaaagtttggagtgataatcaaatggctgaacgtatgaaatggatcgaggtcattatgccgcaattggcggaatcgctggtctcggctaccataggcaaatggttgaaaaaaccgggcgaccgtgtggaacagtacgagccgatctgtgaagtaatcactgataaagttaatgccgagattccatccactgtggatggaattatgggtgaccttttggtggaagagggcacaacgattgctgttggtgaagcaatctgccgcatgcaggtcgcagcttctgatgaagaagcggctgagcaagtaacacaagtatcgcagcaacaggagcaagtgcagcaacatgcgagcctcactcctcttgccgcgtcaaatacagcaggacatgatccgaaccagccgatgcgtaatcggtattccccggcagtgcaatccttggcagcagagcatggcttgaacttgcaaattattcaaggcaccggtgccggtggtcgtattacccgcaaagatgtgctgacatttgttgcacagggaggtaacgcggctggatcgtccgcacaagcatcatctgcagcagttcagcatacaccttctagtatgccgtctgcttctccattcagcggagtgaatcgtggaaatggagaaatgggtttgaccgctggagaagcgatctcagcgtccgatgcaggtgttcctgtgagacattcaggcattcatctaaccgaaagtccgaaaattccacagatcgaagtggaaggtggcggccagggaagatcggagtatttcatcgatgttacccctgtgcgtaatgccattgcccggaatatgcgtcaaagcgtatcggaaatcccgcatgcatggacaatgatcgaagtggatgtaaccaatcttgtgatgctgcgcaataaactcaaggatgaattcaagcgtaaggaaggcatcaatctgacatatctgtccttcatgatgaagggagtcgttaacgcgattaaagactacccaatcatgaactcggtatgggcagtggacaaaattatcgtcaaacgggacatcaacttgtccatggcggtaggaaccgaagattctgtactgacacccgtaatcaaacatgccgatcagcgtaatatcgcaggtctggcccgtgaagtggatgaactggctcgcaaaacacgtgaaggtacgttaaagctggaccatatgcaaggtggtacgttcacggtgaacaacaccggttcatttggttcgatcctgtcccagccaatcattaactacccgcaggcagccattcttacattcgagtcgattgtcaagaaaccagtggttattaatgatatgatcgccgttcgttcgatggctaacctgtgtctgtcgttggatcaccgaatcctggatggtgtaatcagcggacgtttcttgcaacgtgtcaaagaaaaccttgaaggatataccatggagaccaaggtgtattaagtaaatagttgtcgggaaagtgtatgtgccggaggccgtgcacttttcctgctgtctacggacaggtgctcaattgtacactgaacctgaagcagaagggtgtggggaatcatgagcaagctgctggatgttgcatacataccaatgcttgattatgaagaagcttggaaccgccagaaagcgattgtgcagcgattggacgaaggcgagggagcggagcagatgctgcttttacagcacccgccaacgtatacaatcggctcacaaaatcatccggagcatctgcttctcagtccggaagagttgcgtgagcaagggatttctttgtttcaaattgaccgtggcggtgatattacttatcatggcccgggccagttggtaggttacccgttattgattcttggtcgggatgaagacctggatctgcacggctatctacggaaacttgagcaggtgcttatggattatctcgcagaccagggcatcgaagccggacgcaaagagggttacacgggtgtgtggattggtgatatgaagattgctgcaatcggcatcaagtttaatcgttgcaaacaccgccgcggttttgtgaccagtcacgggtttgcttttaacatcagctcaggcattcaacatgcagggtttcaggggattgttccttgtgggattgaacagtatggcgttacctcactggaggatataacgggcaagtcctatgcggtggagcaagtagcgcaggagattgttccgtactttaatcgtatttttcaatatcaaattaattgggtcacggaaaaagaagcccttcaacgtctgtaaacaggtcgtcgaaaggctttaggttgctatccaaacagcaacggttcgagagctatgaaaagggtggacccgatcatggcgatcagcatgagatagatgatgattttgaaccatttctttttttgcatggatgagagaactcctttcaacataaagtgtgtgttcaaaaagactggttttcagtaccaagaagatgggatgaagctagaaatggagtagcggagcgtagggaaaactacgtgagcaacggacatttcggctgaattccatcttcgatgctgatgatgccgcgaggcatccttcgtaatcaaaagcggactttttgaacaacctcataaagtaaacaagccatagtaattgtattgtaccgtatccacgagagggaggaaagtcctatgattaaacaacaacgtgttatcgatcagttcatggaactggtgcagattgatagtgaaacgaaaaatgaacagaacatctcgaaggtgttaaaagagcagtttacagatcttgggcttcatgtctatgaggatgataccatggagcaaaccggacatggcgccggaaacctcgtcattacctgggaagctgaaggaactgaaggggttgcaccgatctttttcacatgtcatatggacaccgtgacgccgggacagggaatcaagcctgaactgggtgaagatggctggattcgcagtaatggaacaacgatcctgggagcagatgacaaagcagggattgcggcattgttcgaagcaattcgtgtgatccaggaaaacaagattccacatggtaaaattcaatttgtcattacggtcggcgaagagtctggactggtgggtgcacgtgccatgaatccgaaggatatcgatgccgagttcggttatgcgttggattctaatggagctgtaggcacgatctgtgttgctgcaccagcgagagctgaaattcaaatgagcatctatggcaagtccgcccatgcgggtgtgaacccggaagacgggatcagcgccattcaggttgccgcaaaagcaattgcagcgatgacactgggcagaattgatgacgagacaacagcaaacattggcaaattccagggtgggtcagcactcaatgtggtatgtgactttgtacagcttgaagcggaagctcgcagtattgttcaggagaaagttgaattgcaggttgcacagatgcgtgacgcgttggaaacgacttgtcgcaaatacggtgcaacagctgaattcagaagtgagatcctttaccctgcatttggcttccatgatgaacacgaagttgtacaacttgcacagcgtgccatccgcagtattgggctggagacaagtacgtttgcttccggtggtggcagtgatgccaatatctttaacggattcaaccttccaacagtgaacttggcggtagggtatgaggatattcatacaaccaaagaacgtattcgtgctgaagacattgtgaagttatcccaggtagtcgtagctattattcaggaaacggcagtagacaagaaataatatagagcacatgttacctcacatgttgttagacaaaagtccgaacccggtctgtatcggattcggactttttgcgaattcatgttatatttcaagggagaagactcgttaatttagggtcaaattgaatcattggatgaatggatcaatgacccattcatttacgtccagcgagcagatcgattaacttggcatccgggccccactcgcgcaaccattgtttgagtatgagctgtacttgccgggcttgtcctaccacgtgtaaggattgaggcgtcatataactattcattgaaagtccccctgattcgtttatatttgctgtgagaattctatacgctcaccatatgcccaaaatcaaagatatatacattaaccgaatatataatcctacgatatggagttgaagaaccaatgaaaccaaatcaatctgcccaatccatccacgcggcgcaacctgccaatccaaaactagatgaagtgaccgtatccactaagccaatcttcgagggcaaagtgatttcgcttcaagtcgataccgttaaactaccgaatggccagacggctacacgtgagataatccggcaccctggagcggtagctgtactcgctctgaatggggatcgcatgcttgttgtggatcagtatcgtcaggcaatgggacgcaccgaagtggagattcctgcgggaaaactggacccgggagaagagccagaggttgccgcagcacgtgaattgcgagaagagacgggatatgtagccaagtcgctgcgtcatttgcgttcgttttacacgtcaccggggttcgcagatgagatcattcatctttacatcgctgaagagttggaagcaggggacatggcgctggacgaagatgaattccttgaagttgccgaaataactctggaggaagcctatgcgcttatggacgagaaccggattagcgatgccaaaacgatgatggccgtgtacgcgtgggacctttacagaacgacaggacggttctaggcatgcaagaccaactggaaacgtccacgatgtgggagccctgttatacagacctgcatatccacatcggacgaacctctcggggtgaggctgttaaaatcagtggcagtcgtgatctgacatttgagaatattgcccgggaagcatcggatcgtaaaggaattcatttgcttggtgttattgattgtcattcaccggttgtacagatggatattgaacaattgctggagagtggtaccatgtccgagattgagggcggcggtattgcctaccaggatacgaccattctgttgggtacagagattgagctgcgcgagcctggaatgcgtgagttccatatgctggcgtacttccgtgatttgaaaacgatgaagtccttcacggactggatgaaacgttatatgaaaaatgtgaatctcagttctcagcgggtgtacgtgcccgctctagagatgcaggccgagattaaggcacgtgggggacttattgtgcctgcacatgtgtttacaccgcataaaggcatctatggcagtacagccccccgtatgggcgaagtgctggatactagcctcgtggatgcggtagagctggggttaagctcggactcatccatggccagttatattcgggaattggatcatgttccgttcctgaccaattcggatgcccactctctcggtaagattggacgggagtataatgaactgcaagtggctgcaccttcttttgatgagttccgtatggcacttcaaggagaagccggcaggaaaattgcggccaattatggacttaatccaaggctgggcaaatatcatcgtacctactgtgcagcatgtggcagcattatggatgagcaagcgatgtcagcagagcgttgtccgcactgtggcagtctgaagctggttcagggggtgttggaccgcattctggcaatctctgatcgggagagtcctcatgttcctgcaaacagaccggcgtatcattatcaggtgcccctggagttcattccgggacttggcaaagccaaactgcgccagctactggaccattttggtacagaaatgaacgtacttcatcgcacgcgtgaggaagagcttgctgcggttgttggacctgtgctggcaggcttgattgtggctgcacggaacggacaactggagctgtcctccggaggtggcggtacgtacggaaaggttgctgttcaggaaaaagcctcggagtgaccggtgtaaataatctttagttcaactcatatagctttcgctatacagaggtccaatctggacaagaagtcatacaggtgcattccggttcataagaatgactatgaggatgtaaatgaaaatccttgcagcatgataccggaaaggggactcgtatctgtatgcgctcttcctactttacatttaaaggtcagacttcgttatatgtattcgtggctgtcttgtttctggtcggcgtgatttttggcgcgctcatggtgaatgcattgtctcttgagcaacgtcaggatctggagggttatctcggtaatttcttcatgaccgtgcagcacagtgcacaagtgactgagaccggggcatattgggacattgccatgctccatctgaaatgggtgggtctgatctttattctgggtttatccgtcgttggactacccggtatactggttctggattttctgaaaggtgtgctcattggattcacagtggggtaccttgttggacagtattcctggaaagggctgctgtttgcactggtgtccgtggcaccgcataatctatttgtcattccgatcctcctgatctgcagtgtagcggcgatgacgttctcgttatacatcattcgcaatcgtgttttgatgcagcgaacacctggtcgacaaaggccttttgcttcatatatagtgttaactttggttatggctgcactgctgctcggtgtggcgtcttttgaaacatgggttacacctgcgatgatgcgttgggtcacgccaatgttactaccggcctaacgtgtaccgtatagtgtaaaatgttgactttaattacgcactccccctataatgaaaagagtgggttaagttgcagtgtgcagtgatttcctagggggagggagaaaatggaagcacggattgataaaattaagcagcaactacagtcccaaggatataaattaacgccccagcgggaagccaccttaagagtacttcttgagaatgaagaagatcatctgagcgcagaagatgtattcatgctcgttaaagaaaaggctcccgaaatcggtctggcaaccgtgtaccgtaccctcgaactgctgagtgagctgcatgttgtagagaaaatcaacttcggcgacggtgtagcgcgttatgatctgcgcggagatacatccaagcatcaccatcatcacttaatctgtgttcaatgcggaagtatggatgaaatacgtgaagactggcttggaccgcttgaagagcgtttggagcgggaattcaacttttcggtagtagatcaccgactggactttcatggaatttgttatcgttgcaaagctaaaaatgaacagaaacccaaagatgaagaataacatagcatatcttcaagctctcaccggcggttttgacgggagagcttttttggcaccggacatgatctggagtttcccccgaatggcataaacctttgtttatggacataccctgattcaaggacaataccggattcgaatcaggaggggacgcgcccatgattatatcagtgcggagagggctccgttttattcgatttattatattttttgctgcattagtttatctgttctatcatgttctggatctgtttaatggctggatctcacctgtggatcagtatcagatgccaactggcaatgcaatcaaagtatttcaggaaacggattggccgggtaatggagaaggacgtcctacgatggcagagcgtctccgtttgttctattggtacggggagtagcttcaaacagccagggatgcaaatacgggagcagtctgccagagcggcagatctgtcagttgaggagcgttgtacatgaaacagacgatacacgcctatgccttatacttggaagatgataaagggatgtcgagcagcacgcttgaatcgtatctccgagacgtggacaagttcattgaatttgcagataaggaatatggcatacgcgaagccgaccaggtcagacgtacacatgtcgtcctgtttgcaggtcagctcaaacaggcaggacgtgccaatgcaaccattgcccgcagcatcgtatctctgcgctcctactttcattttttgatgcgacggggtgatattatacaggaccctacgtttgatgtggaagctcccaaggcggacaagacgccaccacaggtgttaagtatccaagagatcgaacaacttttgacagcgcctgatactcgttcaccgcagggtgtgagagatcgagcgatgcttgaactgttatatgctacaggcattagggtctcggaactgattgcccttgacattcgggatgtacagccagggatgcgctttatacgatgcggtggggcgggcaaggaacgtatccttcccattggtgcaccagctgcacattgggcaagtgtatatgtggaggaattccgcaacaagttgctcaaaaccgattcggacgagcaggcactattcgtgaatgtatctggtagacgtttaacccggcagggcttctggaagctgctcaaaaaagcggcggtggatgcgggaatctcggaagaaattacgccgcatacccttcgtcattcttttgcagcacacctgattgccaatggggcggatacacgtgcagttcaagacatgctgggtcacgtggagcagcctggacaacaatatggcaatcatggtcgcaaaaccatgaaagaaatctatgaaacccatcatccgagggcaagatagattttgacgcatggcattcacaaataaatgcggaacattgggccgatttaggataaaataaattgaatacatccaaacgccgttatacataagacggatcgtttcaactcaaggaggaacatacatcgcatgacagcattaaaccaacaaatgatttcggaagcagcatcttatattcaaagcaaaagctccatcaagccggaagtcggtttgattttgggttcaggtcttggcgtactggcagaactgattgaagatggcgtaagtattgcttatcaggatattccgcattttccagtgtccacagtagaaggacatgaaggtgaactattggtcggaaccattaaaggtcgtccagtcgtgatgatgaaaggccgtttccatatgtacgaaggatatggtccggaattgacagctttcccggtaagggttatgaaagaactgggtgtaagcagcctgcttgtaaccaatgctgcaggcggcgtgaatacgtcgtatgaagctggagacttgatgctgatctcggatcacttgaatctcacaggcaaaaatccactgatcggaccaaatgacgctgcactgggcgtgcgtttcccggatctgtccgaagcatatagccgccgtttgcgtgcgctggcgaaggatacggctgcatcacaaggttttaacgtacgtgaaggggtatacgcaggtatgctcggtccgaactatgagacaccggcagagatcagaatgctgcgtacactgggcgcagacgcagtgggcatgtccactgtatctgaagtgattgtggcacgccacgcgggcctggaagtactcggtatttcctgtatcagcaacatggctgccggaattctggaccagccactgtcacatgatgaggttatggagacaacggaacgtgtgcgtgagtcgttcctggcgctggtagtggcagttattccacaaatgtaagcaagatttgagtagataaggttacctctttggatgagaaatcatcggggggtaacctttttttgttgtgttgaacgtacggttactcattccttgagtacagtgcgtttttttggctatgaccacattttcaataaaagttcgggaaatcatgctttacatggaataatttactggaaacgggccgacaatgattagcagtacatgcatggaacatgcagtaagcaagtcatttgaggaggtaaccttgtgaagaaaagaataatggcatcgttcatgaccctttgtatcctgctgtcccttatggcatcaacagcattggctgaagaaacaccgaaggcagcgggaggaactgatctggccccgtcggcgcgctctgcgatcttaatggatgcagatacgggaacggttatttatgagaaaaacagtcatgatcagctgcctccagcgagcattacaaagattatgaccatgctacttacgatcgaagcgatcgactcaggcaagctgaagctgacggacaaagtaagaacaagcgagtatgcagcttccatgggcggttcgcagatcttcctggagcctggggaagaaatgacggtagatgatatgttaaaagggatcgcgatggcttcgggcaatgatgcctcggtagcgatggctgagaagatcgctggctcggaagaagcctttgtacagctgatgaatgagcgtgcgaaggagcttggcatgaaggatactcattttgccaactgtaacggcctgccggtcgataatcattattcttccgcccatgacattgccgtcatgagccgtgaactgttgaagcattccgggattacgaagtacaccggtacatatcaggattaccttcgcaaagatacggaaaagccattctggctggtgaatacaaacaagctggttcgtttttatcaaggggcagatggtttgaaaacaggttacacatccgaagcgaaattctgcttgtccgcaacagcgtccaaagatggactgcgtgtcgtttccgtggtacttggtgaaccaaataccaaaacacggaacagtgaagtgtcttcgatgtttgactatgcgtttagtcaatatacgatgaaggcgctctacaaggcaggggatctgctgggaagtctgaagatcgaaaaaggtgaagttgccgaattgcctctgaatgccacgcaaaattatagtgtgctgatgcgcaaaggagccaaatccaatgacattcggcatgaattgctggtcgccaaagaattgaaagctccgatcaaggctgggcaaagtataggtaaactggtggtttaccagggcaacgacgtcattaaggagttcgacattcaggctccgcaggatgtgaataaggctggctggtggaagctgttcaagcggacaacgtctaacctgtttgactaaacggcgatgtctgcgagttgcacgtatccttcgaacatattttgtagttaaataggggttttcttctagttttgtcggggggcaggaaaagccttcggaagcgtagaaatccttgttctaagacagggaggagagtgagcaaacgtgaacttgcatgtggaaatggaacaccatcgcgggattctgattgtacgattatccggggagctggatcaccatacagctgacatggtacggatgcaaatggatgaagccatccagcggagacaaagcgagcatctcgtactcagcctgaaagatctgcaatttatggacagttcaggtctgggtgtcattttgggaagatacaagctcattaagaataaaggtggcaagatggtggtctgtgacgtcaattcgccagtgtaccgtttgctggaaatgtcggggctgtttaagattatgccgatatacgaaaatgagggaactgctctctcaggtctggaggtcgtctcatgaatgaaggaacagggacaaatttcatgaatctgcaattcgcggccaagtcagagaatgagtcgtttgcacgggtaaccgttgctgcgtttatctcccagcttgatccaacgatggacgagctcagtgacctgaagacggtcatttcggaagctgtgaccaacagcatcatccacggatacaacaacaactccgagggtgtggtgtccatccaggcggagattcgggaagacatgatcactatcatcgtggaagaccgcggtgaaggaatcgaagatcttgaactggccaagcagccgctatatacgtccaaacccgaacttgagcggtcgggcatgggcttcaccattatggaaaactttatggatgaattcgaagtcagcagtgagcccggcagaggcacctccatcaagatgaaaaaaaggattgaatccaagaaagcattgtataattaggggttggtgttcttatggatgctgaagtgaaaccatcttcacagacctatttggacgatgccgaggtcaaacggctgattgcgctcagtcagtcgggtgaccatgtctcacgggatacgctggtgaactgcaacatcagactcgtctggtccgtcgtacagcgttttatgaacaggggatatgatccggaagatctgttccaaattggttgtatcggtctgctcaagtcagtggacaaatttgatctcagttatgacgtgaagttctcaacctacgcggtaccgatgatcatcggagaaatccagcgattcctgcgggatgacggtaccctgaaggtcagtcgttcactgaaagagatggcgaataaagtccgcaaaaaaagggacgaactgtccaaacatctggatcgtttgccaacgattaaggaagttgccgcagagctgggggtaaccccggaggaagttgtatttgcccaggaagcgaacaaaccaccgacctccatccatgagacggtatttgagaatgacggtgatcccattacgttaatggatcagattgccgacgagtctcaggaacgttggtttgacaagctggctctgaacgaagccatcggtggtctcagcgagcgggagcggttaatcgtttatcttcggtattaccgggatcagacccaatccgaggttgccagcaggttgggaatatctcaggtacaggtatcacgtctggagaaaaaaatactgcaatccatacgcgaccagatcgcgcagtgattctgggattgcaacaacaatattggcgcatatacaccaatatacgacaactaacaaccttctatcgcgcattatggcgagggaggttatttgttgttaatatggggaggttccgaacgattggactgcatgaccagcatcatgccaagaatacatgccataccaatccattgatagaatccaaaaggttcatggagccatatgacggttgttccaacagcagcaaggggctctgcactcccgagtaggctagtttccttgggtgtaagacttttgagactcgcaatgtaaaaccaaaaagcaatcatggttccaaaaaggatcgtaaatatcaaataaccgtaggtttcaagcgtgatgttagcaaaattcattttccagggcgggtgaataaaactcattcccaaaccacctatgatcatagcccagccgaccacaacaagtgaatcgaactttttaatcagtcgcacggcatacagcgtataaaatgcagctgaaaccccagataacagcccccatatcactgcaagcgaggagacagataactgcgtaagcgagccattcgtgagcaggagaaaacacccactgagagccagaacggcgcatgcaaggtcattgcgtgtgaggacagactgcttacggagtgcgatgtaaatcatgatcatgacaggggacaggtactgtaggagtgtagccaccgctgaattgccgtgtttaatggatgccatgtacgtatactgaacggcaagcatgcccaccaatccaaaaatgatcatctgcccagcggtttttttatttctccatacatcaaaaatctgaaatcttccatttgtaaacgattgaataaccagtaatagtaacccggcaatcaacaatcgcacagtgacataccaattgacctcaattccatccagttgaaacagtttttgagataccgtccccccaatgccccagcagatggctcccgtcagaacgagtatgatgcctgaaattttgggttttgcagaagttgtcattcttgttctcctcaccttaaatataagaatagtgttatattaaggagaaacgcgatacatttatatcaatattacacttaaaaatataactatattgagatgagggccatgcagaagatcgaatttatcattgatcaacatttgaaagaaatgacgcaacaccgtaccgatacattatctatagcttgttatgagacaaccattgttcaaaatgttcacagacatattcctctccactggcatgatgaattgcagtttgttgccgttcttcagggtacggtgttgtttcatatcaacgatcaaaagatgattttgtccaaaggtgatgggatttttatcaacagtggaataatgcatatggccgaagatcacggggtgagcgagaactgcatttatttatgtctgaatttgtccccacatgttatcatgccttcggatttgtatataaagtacgtacatccatatgtaacagcaactaatttgccttttttgtatatcgaaagagctaacgcttggggagaacagatcttggatgctgttgcacggattagaaaggagctagtgcaccaagttcctttttacgaagtgaatgttgcttctgcggtgcttaatatgtggaaactgctgattatgaacggatattctcttgaacatgatccatcagagatgagcagaaacaaccgaatgaaagacatgttgcaatggattaatctcaattatgccgatccaattaagcttgaagatattgcaaaggctggacagttaagtcgatcggagacatgccgttatttcaagcaaatcctgaaaaccacacccatgcaatatgtgatcgagtaccgcatccaaagaagcattgaactattgcaactctccgagcgtagtatcacccaaattgcctatgaggttggttttaacagcacgagttattacattaaccaattccgcaaaacaatgaattcaacccctttacgatttagaagggaattgaacaaaagagaaaaagaacataattcttgaattattgttcatgatccgtgaacctatctaccaataccgaagagtcgctcatacggcgactttttgcttcacactcagttgcgcttcaaatccccaaatttctaaaattaatatccagaagctaccttcacaagtcatggaattttgagcaaaataaccccaaaaagctcatctttcaattccctccctgcccactccccagcatatttatttcaaacgtttggaaacgggaggacgatgggcagcggagggatggaatcggtcaaaaggagcgaagcgtgagggttcatctaaggatacataagcaacgcaggcggcagattagacctaaagaagcgaagcgtgcgcctttgtctccaaatttctaaacaacttctaagacgcatgcagaagacaactccaacatcatagaattgtgagaagaataaccccaaaaaagctcatttttcgattccctttctgccacctccccagcatatttatttcaaacgtttggaaacgggaggacagtaggtagcggagggatggaatcggtcaaaaggagcgaagcgtgagggttcatctaaggatacataagcaacgcaggcggcagattagacctgaagaagcgaagcgtgcgcctttgtctccaaatttctaacacttagaaatcaatcaaaagaatttggagacaacagcgatcagaaggttggtctgccgtcagagtgtctgcgtgtatcctcccccgagcaacagcgaccaatgaccgatccatcccgcagcgccaactcagccttccaacttttttccaacccgtttgtaataaatttgcacattcttcaaatactaacctaaattacgcagtaagggagtgctatggatgtcccagacacccactccaatggtctatattcgtctgcgcagccgtattcgcatccagaggggcagagcagtcaagcttggagacattgcacatgtactgacctcttctgaagaccaggagagcaggctactggagctagaactgctgcgccctggaccggaggatggcaatctgatcctcattgatatattgcagattattccccaaattcggcacatcttgccggaggtaagtgtggaactgataggatcaggccatacgttggttgaagtcattgcgggaaatggtcaaccttccaagtctctgttcatattggtttggctgctgctgttcttcggatcggccttaaccattatgaattttcatgccgatgtgaacatgcaggaagtacagattcgtattgtggagatgcttactgggcatcgggacgaacatccctatctgttccaagtggcgtattccattggcattggattcggaatggcagtattttttaatcatttgttcaagaaaaaatggaatgaggaacctaccccgctggaagtagagatgttcctataccagcaaaatgtagataaatatgtggtgattgaagaaagtgaacggatgcacgagcaggaacgcagggagatgaatgcggatgagcgttcttaatggagcaatcagcattgtattgggtattgcagggggaattgccgtagggagcggcgtaattgcgctcattctggtgctcgatatgattcccaggttggctcaacttacgcaatcgtatgacaagactcactggtacgaaggggcgctaataggtggttcactgctcgggacggtggcggacttctggcactggaaaatgcagggggtgctgttgctcagcccgattgttggtttgttctgtggcgtgttcatcggtctgctggccgcggcgctcactgaggtactcaatgtactgcccgtattagccaaacgattgggcatgaaaccttatttgtttggattactgctcgccatgattttgggcaaaatgacaggttccctgtttgattttttcatatatcagcggtaactcgtggccataggaggatggaagatggatgaacgaacggagcacacaggccaggaaaatagtgaaggtataacggaagagatgttacacaagtctgcttatgagattcagaaggaaaaagaggagaaagcgtacaataagaaaaaacaaaatgagatgtccgacagcattgaggaatccgtacaatattggcaggaaaacgatgatatctccccacgcatgagtgagaacaagtatacgctgcaacaggtactggggcttggagaatcgttcgacgttaatatgagggaaatggtcctgggtggcaagcacgttggattgctgatgattaccggttttgccaaggatgagattttgcttgaagtcttgaaaagattaacctatctcacgccggatgacgtctcaggacatgcactcaaatcctattttgaatgttacattccccatatacaggtggaaaaagtcgagaaaatgagtgcggtcatcaacaaggtacttaccgggatgagcgcaatgttcgttgagggggaccgctcggtcttaattatggatacccggagttatccggtacgttcacccgaagaaccttcattggaaagggtagtccgaggttccagagacggttttaccgagacgctcttgaccaacgtaaccttggtgcgccgcagaatacgcgaccctggactgaagtttgagatcatgcaggtggggcggagaacacaaacggatgtctgcgtggtgtacattgatgatattgtggataaagtacaggtggattcagtccgggaaaaaattcagcgagtggatatcgatggtattcccgccgccgataaacagctggaagaagcgattatcaacaagggatggaatccgttcccactcgttcgatactccgagcgaccagatgttacagcttctcatttgttggaagggcgagttgtcatttttgtagacacttccccgagtgtgatgattctgcctacgaccttctttgacctgtgtgaacatgcggaggagaacagacagacggccttgatgggaacatatttacgatgggtgcgttttgcagggattctcatctcgttgtttttgctaccattatggcttctcatggttattgacccttcgattaaaccgatgggacttgacttcattggtccgcaggaaaatgtaaagctgccgttaattttacagtttctcctgatcgaactgggcgtcgatttattacggatggcagcggttcatacgcctacacctctggcatcggccatgggcttgatcgcggccattctagttggggatatcgccgtcaaaacaggatattttgtcaatgaagttgtactctatatggccattgcagccatcggtatgtttgctacgccgagttacgagctgggtctcgccaacaggttggtcaggctggttctgctagtcgctgttgcgatattcaaggttccgggattggtcgtgggctgtacattactcatattggcgctcaccgttcaccggtcgtacaattcttcgtatctctggccttttataccgtttaatgcaaaggccttgggcaactttttattccggcttccgctgctggaaaataaaaaacgtccatcattcaataaaacccgtgacaacaccaaaatgtccgatgatccggacggggaactacaaaaaagtaaaaaacacaaatgatcttccaaaaaatccattcatctcgctgcctaatttgatatactggtgtaaaatcattggaatatcaattgttccagtatataaaaagtgaggaatgcagattatgtatttacatggtacaagtaaaataaatgcgcaaggacatctggagattggcggagttgatgcaacagatctgaaagaacagtttggaactcccctgtacgttgtggacgagcaattggttcgagagcgttgcagagagtacatggaagcattccgtgcttccggactgggcttccaggttgcttacgcaagtaaagcattctgtgtaatggcgatgtgtgctcttgcagctgaagaaggactttccctggatgttgtatctgacggtgaactgtttactgcactgcaagcaggattcccggctgagcgcattcacttccacggtaacaacaaaacgctggaagagatcgaaatggctcttgatgcagagattggatgctttgttgtagataacttcaatgaattgcatctgttgcaggctgtagcagcggacaaaaatcgtaaagtaaacattttgcttcgtgtgacgcctggtgttgaggcacatacgcatgaatatatttccacaggtcaaacggattcgaaatttggattcgatatcggtaatggtacagcatttgaagcgattgacttggcttccaagcagtctaacctggtattgctcggtgtgcattcccacatcggttcccagatcttcgaagttgaaggcttccagatggctgttcaacgtgttgctgaatttgcagcaagtgtatatgagcgtcttaatgttgctttcaaagtggttaaccttggtggtggattcggaatccgttatatcgatggagatacgccgcttgaagttgcgcaatacgtgaaggctattacagatgccgttaaaaatcattttgctcaaatcggctatgccgtacctgagatctgggttgagccaggccgcagcatcgtgggtgaagcgggaacaacgctgtataccgttggaacaagcaaagacattccaggcgtgcgtaaatacgttgccgttgatggtggtatgaccgataacccacgtcctgctttgtatgaatccaagtatgaagctgtgcttgccaaccgtgcgaatgaggctgctcaggaaacggtatctgttgcgggtaaatgttgcgagagtggcgatatgttgatctgggatctggacctgccaaaagtagaaagtggcgacctactcgctgtagcttgcacaggtgcgtataactactccatggcgagcaactacaaccggattcgtcgtccggccgttgtatttgtcaaagacggtcaaggagatgtcgtggtgcgccgtgagacgtatcaggatatcatccagaatgacctggtacctgcgcgcattggaaaacagccagtaactcgctaattcgtcaaaagataatgcgtttctgcattattcaagatataggattttgcagttgaagcagatgaaaagggaacttcctttttcgtctgctttttgcgtatttgagctaaatcatgaaaaaagttgccgttttttttgcgatccagacattttcggtgtacactaagaaaagtgctgtaatgcttggcccagggtcatgcgttctggcaccattaacgatggtcaatacgaaaggagtcatttacatatggcgaaacaagcgaaaattaaattggcaaacggcggagaagttctgatcgatctgttcgatcaagaagctccaaacacagtagcaaactttgagaaactggctaattccggtttctacaatggtcttacattccaccgcgttatcccgggctttgtagctcaaggcggatgccctaacggtagcggtgcaggtggcccaggttacacaatcaactgtgaaattaacccgaacaaacatgagcgcggaacacttgctatggcacatgctggccgtaacacaggtggaagccagttctacatctgctaccaaccgcaaccacatttggatggacaacatactgtatttggtaaagtaactaaaggtatggagttcgtggacgctttagaaggtaaagacaaaatggaaactgttgaagttgtagaagcttaataccttcaccttaactggatccaaacatgaagtgcttcttttatagaagcactttttttatttttacatacttcaaatcgataattagaaaggatgaataaaaccttggatatggttactcagctaagcttgttaaaacaaatttatagtgagcgcacgttgtgggatgaagaattgcaggcatcgcgccatgtcgttccggatagtctatcggtaaaggatcgagaagcgcttgaggcagccgggcatgaaccgaatcgatttgtacgtccgcaacatgatgaaacgattgctgagctgaaaaaagttacgaatcaatggacgatcaatgatgcagcgcaggcctttgtatcctctttgtggtcagcacccatgatctggcgttcgttgcttacgggcaagcttattgcgagcagtatgccaagccatgaacatacgccatatccatcttcgaacacttgcaagatctgcggattaagtgtagatcaagcaaccgacacaacgctgcaatggtattggcggatgaccaatggaaccccgttggacggtgatccttttggatatgtgttggcacttcgagagctggctgccgcgcaggagcttccaatacccaatgagtacgaccgctggacattccgtgcggtgttaacggtgctgcgcgaattacctcccaaaacacgttacagcaaggcagcagtagcgctcaagaaggaacgtcttttgcctacacagaaggaatatgcctaccgtgatttgcttgagacgttagctctgattggcatactggatacgccggagcatcctggaatgatcacggaatttacctcttatatgcaacgtgacgcacgccccaatgtgcgggtggaagtgcaggcccctctggcgtggtgggactcatctgtcggaattaatgagaacaacctaaacaagatatttcatgattttgatctgaataatatatcacttgcggataagcctgatgagagtccagctctaaaggacacgatcttaggggcattggagaagaagagaagtgttcgcggaaaagtaccaaaggcatctcctgatgcaggtaccggggaggtacagtctggagatgtgtatgctgttcgggtccgggaaggtgtatgggtgactgtatactgtcatgaagtcagagacaagcgcgtcatcgttgaatatctggatggtgtctttccagagatgccgggtaaagcagatttgcatgggacgtttcgaccgagagcgaatggacgctggaaatgctcggctatagcgatcgattccacaagttgggtcagaagggtggcaagagagttcccgcttccgacttcgcccctgcaagaacctgatcgcactccattccataatgccaaagaattaaagcatatggctagctggtgttttcctgatatgtagaatgatacgatgggtgtgaaaatgggccgccaagcaaaaaccgtacctccttgagaggaagcggtttttgttgtttcttagcttattaaaagttagtatgtgacaaaaaggaacaaaaaacaattgattttttggcattaaagtgctaacatccaagtaataacgaaagcaatccttcagggcagggtgcaattccctaccggcggtgatgcaggaagtgtaaggacctatgtgtccagcacttgatgcaaagtccgtgacctgtctgccattggcagatggctgatctggtgtaattccagaaccgacagtatagtctggatgggagaaggagaggtgcagacctaacaggtttgcattcagcaggagtattgctgcacggtcacgatgtgtgatgtcatgcactgtgcagggaagatccggttacgccggacagttccatacatatgccgcactataaaagctctttacctgtaattgatgttcattaaggtatgtgtctattttcacttgcccgaaatgaagttttgggcaaagtgttggcgtgctgtatccatttcactcctgctgttgacatttgtctctcatcatccccatcgaactgattgttcgacggggattttttaataaacaagactttaaaccgcggggtgaacggatttggaaatgatcaatgatgaattttatatggcactggcattggatatggcggaacgagcacagggacagacggggattaatccggtcgttggatgtgtagttgtgaaagagggtcgtattgtaggcctgggaagccatctgaaacgtgggaccggtcatgcagaggtgcatgcacttaacatggcaggcagtgatgcagaaggaagtacggtatacgttacacttgagccttgtagtcattatggcaagacgccaccttgtagtgaacgcctgattcatgaaaaggtgaaacgtgttgtggtatgttgtgaagatccaaatccgcaagtatccggcaggggcataagcatgcttcgtcaacaaggcattgaagttgaagttggcgtactgcgtgagcgaggaagacgcatgaatgaaaaattcattaagtttattacaacgggtctaccttttgtgacgttgaagacagctacaactttggatgggaaaattgctactcgcagcggagacagcaagtggatctccaacgagcctgctcgtgagattgtgcatgcccttcgtcatcgtcaccagggaattatggttggcgtcgacacggtaatcgccgataatcccgaacttacaacccgtttgcaagtcgaaggcattagtccagtgcgcattgtagtggattccaagttacgtctccccgtaggtgccaaaatggttaaggatggtcttgctccaacatgggtgctgacaacagacgaagccagtcctgaagctgctgaacgtttggaagcctacggcgtcgaaattatacgctgtggtcctggaccacgtgtggatctgttaaacggacttagcaagttgggtgagcgtgacattggttcaattttgcttgaaggtggaggcaccttgaatggagctatgctggaggcacggttggttgatcgactgctcatgtttatcgctccgaagattgtaggcggttatgatacacctggaagcttccgcttcgagggtgtggaacgtatgaatcaggcgattcaattgaatcagttggagattgaacaagttggagataatatcagcattggcggtattccggtgtggcctgaataaataaatggatttgaaagtagaaagttaggttctttataacttgaaaaagggaggcggcagcatgtttaccggtttggtggaagaagtcggtcagatccggcgtattggtcggaaaggcgaagcgatggtcctgaatatcggagcttccgccatcatggacgatctgaagattggtgatagtgtagcagtgaacggcgtgtgcttaactgcgacaacgctcgaaggtggaggttttaccgccgatgtaatgcctgaaacctatcgccataccaatctcagtcagctgcaatctggcagtaaagttaatctggagcgggccatgcaatcaggcggtcgttttggcggacatatcgttcagggtcatgtcgatggtactggagtgattggcagtataacacgtgatcagaatgcaattgtgtttgagatcaagcctgatgatcaccagttgttcaaatatctgatccccaaaggatcggttacactggatggcattagcttgaccgttgtccatacatcggataccgcattcacggtttccattatcccgcataccattggtgaaactgtactaaatgtgaaaaagacaggggataccattaatatcgaatgcgatattttgggcaaatatgtggatcatctgctccagtatgggagaggacatcgggagacgggtactggcaagccgcgcagtatcagtgaagattttctctccaatcacggatttgcataaatagagaacagaaattaactggaggtggaccaatgtcagaacaatccattctggacacaatagaagaagccatatatgatctcatgcgtggtaaacccgtcattgttgtggatgatgaagatcgggagaatgaaggcgattttatcgctttggccgaaaaggcgacgcctgaagtcattaatttcatgattactgaaggtagaggtctggtctgtgttccgattacacaacaacgtgcggacgaacttaacctgaaaccgatggttcaacaaaatacggatttccatggaacagccttcaccgtctctgtggatcacaaagatacgacaacaggtatctcggcacatgaacgctctattaccgtgaaaggtctgatcgatcctgaagcgaaagccggggacttccgtaagcctggtcacatgttcccgctgattgcaaaagacggcggcgtacttcggcgtgccggacatacggaagcggctgtagatctcgctatcatgtgtggttcctaccctgctggcgttatctgtgaagtaattaaggaagatggcacgatggccagacttccggatctgcaggagattgcccgcaaacatgatctgaagctgatcagtattcaggacatgattcgttaccgtaacgaaaaagagcagctggttcaacgtgaagtagctgtgcgtatgccaacggactttggtgagtttcaagcggtggcttatacaaacgctgtggacaataaggaacatgtggctctggtcaaaggagaaattgatggttcgaaacctgtacttgtacgtgtgcactctgaatgtttgacaggtgatgtgttccattcgcatcgttgtgactgtggtccgcagtttgatgcggcactcaaacagattcacgaggaaggcaatggcgtacttttatatatgagacaagagggtcggggtattggcctgatcaacaaactcaaagcctataagctgcaagaggaaggtatggatactgttgatgcaaacctgagtttgggttttgctgctgacttgcgtgattacggaattggcgctcaaattctgaaagaccttggggttcgtcagatcagactgctaactaacaaccctcgtaaaattaaaggccttgaaggatatggacttgaagtcgtagagcgtgtcgcgatccagatggaggagaacgaggacaatacggtgtatcttcataccaagcaagccaagctggggcatatgctcaagtttgatgatatcgagcagaacgaacagtaaatatattttagatgaataacgttcaccatgtaatttatggaagagattacttaggaatttccgttacttacattacattataccgttagggagatgacttgaatgccacaattttttgaaggacatttagtatcagaaggatccagatatggagttgtcgttggacgttttaacgaattcattaccagtaaattgcttagcgcagcactcgatgcattcaaacgccacggcgtgcaggatgatgaagtggatgtagcctgggttccaggtgcgttcgaaatccctttgattgcgcagaaaatggcggagagcggcaagtatgatgcggtgattaccctgggaaccgttattcgtggatcaactacgcattacgattatgtgtgcaacgagatggctaaaggggtagcagcaattaacctgaaaactggcgtgcctacgatctttggactggttacaacagaaaatattgaacaagcgattgaacgtgccggaaccaaggcgggtaacaaaggttgggatgcagctacggcggcaattgagatggcaaacttgacgaaacagctaaaatagtgcttatttaatagtagtgccctgctttgcgcagacgaacacgggaaaccggattcggacggcttagcagggttttgtatttttctggcgggaggattcgtctagtgacggtagttacatacaaactggagacttttgaagggcctttggatctgctgcttcatctgattgataaggctgaaattcatatccaggatattcccatcagcgatattaccgatcaatacatggcgtatctgcattcgatgcaggaactggaactggatattacgagtgaatttctggtcatggcagcaacattgctggcgatcaagagcaaacttttattgcccaaaccaccggtcattgaggacttcgaggattatgattttatggaagaagaagattatgatccacgtgcagagctgattgcacgtctgatagaatatcgcaaatacaagggaattgcgcgtcatcttcatgaacgggagtgggaacgcagccttatattttccaaagagcccgaggatctgcgcccctatatgcccgtagaagcccaatcgaatccggttgagggtttacacacctctgacctgattgcagcctttcagaaggcgctacgcaaggctgagaagcgcacaactgtaactcgaatcaaacgggatgagatttcggttaaagaccggatacgggatgtcatcggcgctttggaaagtatggggccgggaggcaggctgttattctccaagttgatggatgaacatatctatcgccatgagattgttgtcacttttctggcggtgctggaactgatgaagatgaagcagattgtctgttatcaggaacggatgtttgaggatatcgttatggagtggagaggggaaacaaagaatcatggattttccgaaattgaaatcgattattgaaggcctgctgtttttgtccggagaagaaggtctgagtatcaaacaaatcgccgagatcgttgaccagcgagtggagcttgtaacggatgcgattgaggagatgattcatgaattttcacagcagggaagaggtgtacagattctcaagatcgctggtgtagttcagttgggcaccttgcctgaccacgctgtatatttcgagaaactggcatactctcccgcgcgtacgtccttatcccaagcggctctggagacgctggctattgtagcgtaccggcagcccattacacgggtagagattgaggaaatccgcggtgtaaaatcggagcgggccatccatacgcttgtgaataaggatctgattattgaagtgggacgagccgaggcgatcggacgaccaattctgtacggaacaaccaagtcattcctcgattatttcggattggcaacaattaaagaccttccggaaccaggcttgttcgaagattccgaaaacctggaggaagagacacaactattattcaacaaactggatttgcaacaactggaaccggaaagtgctgatccggcggatgacctaagtcatatcgacaacgaagacgataatacggattcatcattctaatttgcaaattcatactaaccgacacccatcagtggagtcggtttttttgtgcattattttagataaacaatgtgtaaacattttccaaacaaatattaaatgggatttttaggtcagacgtgaattttttcctattcagaatgccatactagacgagaaaagaattgagggcttggaggtaaggcctgtgtggatttggcttggaggaatcggtttgttgttcgcattgctgattgccgcagtcctcatctcaaatgttcatgtacattttacattcagtaaacataaaagtgatgattacgccaatattaatgttcgtcttctctatggaattgtgcggattaactatgagatcccgagtattgtttttcgcaatatgaaggaaggttttctggtcaagaccgaacaatccatgaatcattcgagaggcgaggcccagggaagcgagcgggtcaacaaacgcaaagtcaagaagtgggctaaagatgtgaaaattatgcttagggcaacggacgcgctcaagctgtggctgaagcaaacacttacacgcgtacatatgacccaactgtcctgggctacccacatcggcgttggtgatgcagcatatacagcggtgctgacgggctgggtgtggagtatcaagtccattattattggttttctcacctatcagatccgctttgatgaaacacctgtgcttcaggttatgccggtatggtccgatgaaatggaatttagaaccgagctcgatttcagagcgaaaattcggattacagccgttctgatcgctggagtcacactactcacccgtgtgcttcaagtcgaaggcggatggcggatgtggttcaagcttcttcaggaacagcgccgcaggcataaggagaagcaaaagaagaaacttagtgggacaacagtataaaaataaaaacccatcatagtcggtctgtttttgggaatgtaaggttgggatttggtgagtgtatttaaaatgcttattacataagtcccttcaagtttggggatgatatggttagatcaaacctagcttacattgaaactggagggaatttaaatgtcagatcatccaattcaaggcttaatggaaaccgcaatggaaaatatcaaggccatggtggatgtcaatacaattgttggcgatgcagtcgaaacaccagatggtaccgtgattctgccaatcagtaaggtgggattcggatttgctgccggtggtagtgattttcacgttaatggagaaagtagtggcaaaagtggtgctacgggtacctctgctgaacatgcgagttcagcgaaagttgcttctccgtttggtggcggtagtggcggcggtgtatccatacgtcctattgcgttcctggttgtaggtaaacagggggtacacattgtaccactcgataactccacacatctgtttgagaaactcattgactccaccccttatgttttggaccgaattcaaggcatgttccaacggaatacaacaccaacgaatacaacaggtgtaccagttacaccagatccatcaacctatagctgaatcatttcgtcatgatccctcccgcatccaagcgtgagggatttttgctgtttgtatagcggatggtgagtgttttttcggaggtttccgtattgcatgagacttatgtctatgatccgcctaacctagacatgaaataggttattaaagggggaacgttaatgcacagagataccgtgtttatggttttgtttggctggctgctatcggcagtcgtgtatttggtaggaggaattgatcacctgtttattgccgtgaccatctttgtggggctggattacatcacaggggtactgtctgcatggtataggaaggagttatccagcagggttggatggtggggacttgctcgtaagtcattgacatttgtttttgtcattattgcacatcaactggatatggttgcaggcaattccaatgattttatgcgagatgcaatgttaatgttcatcattggtaccgaaggaatcagtattttggagaacctggggaaactgggcctgcctgtaccgaagtttatcacttcagcactctttaagcttcgagggaatgaagatcaagttgaagataaggagaagatgtcatgatacagatctccaaggattacatacctgttaataaatacagtcgggccggacttaaattaaaagcgaaacgtggaattgtgatgcattatacggcttctcccggagcgcccgcgaagaacattagcaaatactttgcaagtctggcacagcaggattccaataaagcagtgaaaggtcgttatgcaagcgcacacttctcggtagatcgaacttcgatatataacagtctaccggatgatgaactggcctaccactgcgggagtgcaacatacacgaaggaagctatagccaaacttgggacatatcctaacaatagtacagtgggcattgagatgtgcattgaaaaggatggcagtatccatgaagatacatttaacaacgttgtagacctcgcggtatacctaatcagggaacggggctttccacccgtcttcttcacacataaagaagtggttggatggaaggaatgcccactgccatggattaaacaaccaggtgaatatgaaagatttaagcaagcagtacatataaaattaaacccactgcaacaaatagtagtaacggaggatgatgatatgaatacggttctggattatgaacaatgggcctggaatgaacttgatcagtacattggagatgcctacaacgacaaggtgattgaagattgggcatgggtagagaaggtacgcaagaagaagttaacctatggagaattgctgttactgaaggttttaattgatgagcgcagacgtaaaaagtcctgacccaaagtacatctcagatagaggttatgcctgtctgctagttaaccaagagttaaagtgtgctggatctttcaaaaaataaaaatgttgtataatcacgatatgatcaggatactcaagttcatattgggtctgaatcgaggattcatcgacgactccaataacagcgagttgatttgtttcgatcacatgtgttggtgtgggtgagctcatacaaccatcctttcgtttattaagtcagagtcaacaggggcgatggagatgtccatggtccctagatgacctatacgaggcaggatggggaaggttaaactgatccgtttcaaaaaaaggttcaaattcaaaaaaaaccagaaccccacgtcgaatgtgatgtggggttctggttatgtaactactcttttgagaacgtgtccagggcctcatctgtaagatggagttctgcgaaagccctgcatatcttttggaaagatctaatggtatttgtctcatacaacatctcaatgggatcaaaacctaacatgacaagcgaatccacaagttctgtctgatctacttctgtatggtggagcgcttcaagcatggtttcaataactgctaaaaataaaatggctttattcactgtctcgattggtgtcccctccttcgtaatactactagaataagcagaggaggacagaaaataacgagaaattccaatttctcagtgatgaatctattcaatctaaaagtgtggagagaataactggttattgtaaattaaaatctgatgataagctctccctttgtatgtaagattaagctttttcgtttacttcgtggagaatggaatcaattaattcatcatcaatcagagtgcttgctttttcgagcgccaatagaataccttgcggttgttcaaaaaagactgtagagagaataggggcaacctcatctaaattaatcttctcagctttgaccatactgatcaaggcaacaacgatctcatgtccctctacgttaccttccataaatcttgttcgtaaatgagttgctactatttcggtctttgactgcgagtacgccattacatttccctccaacggtttgaatatcttagcagagctcctcttcatgcaagtttaaaccaggttagattaggagttatcttaacaataataaggcagatagtttaaattatcaacagctactaagtcaataaaatcggatttggaatcatagttttatccagcaaaaaagacccggagagggtcattttttgggtctgccttcccaataatcaggaaatccgttgtaatcccatgcgttcagattttcgctgtcggcttgaatggcaacatctgctccggaaccaaagtcaacacctacggtttgcagttctttggctttaataaccagtaccttgccgggtgcacctgcacacaccagagcaagcttccacggtgtctgttggtagatatgttccatttgtttggatgcagtgctcacatgagaccacgaggggcagtccaccgttcctacgatgcttgtccacccgtatctccgctccagaacttctcgatattgctcggccttggctccgcagatcagaataggcatggtcttgaatgtttcatagaataacttgaatcgggcgatgtaattattctcaaaagcatagaaggtctctctgggctcaactttgtaatatgcaaggcacatatcgaataacggcttgaaataccagtgatctgtctgggtcagatgtccgacgtaatccgcttttcgcaggcagtgtacgataatttccctcgcacttgcattgggtaaggttatcccgcaataggtagggtcgttcaaccagccgtaatgagacttaatgaaatccatagtcagaacggtatcgtgggccagaatggtgttggaagcatccccaaatcgtacagaagcatgggcttctccatcagaggccatttggaaccagttgtggattaattctacactccccagcatgcttgtcaccttctttccatgtgtgaataatgttttttttggtatacatattcatcaactccttctgtactagaataggaaaaatgcttcgttctctctcttcttttgaggaatcactcctttttagttcaatgtgcgaaggttattgagcaacagtctagactatgtaaaaagggagaggggatggactgtgaaaaacgtatttataggtagtcctgtacgtaaccgggcttggattatggaacggcacttgcaatcacttgagcaacaagcagtgcagaagcattatatgtacatcctgaatgatagtgaagatcagacggagcatatccttgattgtcatcagattccttatctgactcataatctggggagaacatatggtcatatacgtggacaatattcctatcaccacctggcgttgttgaggaatatgcttctggatgagtttctgaaatcggactgtgattatctgttctcaattgatacggatatcatcattcctgagggtagcctacggcagttaatgtataatgacaaagatatatgcgcaatgcttatacggaatcacccaaaattgaaggctcataatgccatgagcggcggaaaacatatacctgaattcaaagcgggtttgttccaggtagaactgacaggtgccgtatatttgattaagcgtgaagtgatcgaagcaggggttcgatatggttcccatccaacaggtgaagatgcaccattttgtgagcaagctagaagattggggtttgaactgtttgtagatactcggttgcgtcccgttcatgcctatgcggaaggggtggagttgattgctcaattggctgcttcgtagaaaacaacgagaaaatccggtttttgaaagtatagaaatgaccattgtctacccgcccgcacttgactggaacctcttgttccaacgtcctcagcaattgatgaccgccttctctaatattccaggtatacgggctatctttatcaatgaagaaacctacagaaagcagacccgcccgattgaaaagttaaatgaggatctgttccttgtgcagaaaggtgtgaactacgatcacctggtcaaaggaaagaaggtactctggttctcgaatccaggtcagtacaattattcggatggacggaagtttgattttaccgtatttgattacctggataattcggctgatgagtttgctgtgtggaaatcctacatcccgaaatgttttgaccgtgcagatcttattgccacgactgccaaggtgatgtacgaggcacataaacatgacggaaaaccaatctttatgtgcccaaacggggcagattaccaacattttgagaaagcgcgggttattctgcccaaaccggcggacttccccgatgttcatgaagggcaaaagattgtgggtttccacggtgcaatggcatcgtgggtggattattcgctgattaccgctattgcagataaaggttatcatgttgttttgattggaaacaatgccctctatcaaaaaaatattgtgcatcccaatgtgacttgtcttccgcacaaagattataaggtgcttcccgcctacattgctcaattcgatgtctgtatcgtgccattcaagctgacagagatgatccgtggctgcgatccaatcaagtattacgaatatttgtcagcgggcaaacctgtgttgacaacgcgtatggaggaaattgttcataagtacagcgatgtaacttactttatgaatcagcataattgtggattgatgttggagaaagcgattcgtgagaatagtgcttccaaaattgcggcaagagtaagggtggctaagtctaatagctgggatggcagggcaatggatgccgtgaagatgattaatcaggtcataggaggtatgagaaatgagaaagatatttaaacgaatgtttggtagccaaccgactacaccgacaattgagcttgaagaaatagagattgacgcgacggagttcaatgttacgacatataccccaaacacggatacaacgattgtatatctgcctgcgatcgatttccatagtgaacgattcgggcgtcgaccacaacggctgttaaaagcactcgcggaagtaggctacaatgtaatatatatcaactccagtgatgagttctatcaggttgatgccttggagtatccatatccggagcttccaaactttgtcgtagcccgtgtgggccagaatgtccgtacgctgtttcagggtgatcgcgtgatctactgggtgaacgatagccggctggcaagttctgtcgagacagcctatcctgatctggtcgtatttgattcgttgaccgatccggatcagtacgagaagcacaaacacaagatggaagctgttgctgacgttgtcttcattacacccgagagaatctatgagcatggcaaatactgctcacatgttcatctggttactgccgatgaatttgagatcaaggaacgtgcggaacaggtagcgcaaattatagatgctttgccaaacagaatggcccctctaatgtaggggtcttttctttgatcgtatataggccttttccttttgcaaagatgacggggctaatcgtgcttcaatatatttcgtttacattatcgttagggattgaagacagcgttctacactataaaaagcagagacggcgaacagccagacgggttaaacgaaatggatctcccgatcatcaagtcaattaacctgatcccggcttaagcaagtctcagtagctaaaattacatactatcctaaggagtggactgttcaatggctaaaaaaatgattatcaaaggtgtaggtacgtttatggctaaacgccttccaaaagatccgatgggcgaaattgaggtagttaccctgggtaccctgcaagatctgaaaattgaccttaacgtggagcttgaggacatctttggtggtgacggtctgttcgccattgatgtactggtgaagtccaaatcgattgaagtatcggcaacagacgccaagttcgatctggatgcgatccagctgatgatgggttcaacggtacaagagcaagtgaagtcttatgtatgggtgctgaatgagcagtctacagtggcggcaggcgtatccaattctggctttgctgaagccaagccaaaatatgcaagtaaaatctatggaagcaacggtggcatcacggttcgtctcaaagattccaacacattgctgaaacaactcactttaaaaggaacggccgtggaaccaaatgcgttcttctacgacgaagcaaatggtgtagtcatcctgaatgcggtccatatcgataaggagattgtgctgaactacaaacgtgaagaaactgtagacatggttgacctgttggttgacgaagtaccattcccaatctctgtcgttcatcacgggacgttccagcaaaaagatggttcgtatgcaggtgttgaaaccgagttgtacatgtgccgtgcaaaaggtacattcagcatcaatgcccagcgcgctgccgcttctgcatctgcaatctctttgcagattcttgaccctgaacgtgctgatggaaaaatcggcagtatcaaacgcttcagcgcaccaagcaagatctaatatctaaataaggttgattgctcctggcaaggtatcaaacggcatctgtgtcctccccttcacagagccttgccttgccaggctttttattatatgggggagaatgtcctggggaggtctttaaattcatggaaacagaacaagaaaaatccgagcgtgagcttgcggaaaagctgaatgaggaagcggcgaaacgaatcaaagatgatccggaaaacaaacgggtgactccggaggaagtggaagctgctgagcgtgcattctttgaagatgatgagattattacgctgcgggatcgacggaaatatcgtattccgccatgtaacctgaaggatgcccgccgtctgatgaagttgctaaaaacggtgaatatcgatgccattattcttaacttcattccgactgagaatgatgaactggatgaaaagcggcagcaggatttatttgatgtattggcaatggcattcaaaaactatccacatatcgtgaccaaagatgagcatggtgagtataccatcaatcgagagtatctggatgagtaccttgatctgaacacagctcgcaaagtcattgatatgctcattggactcaatggtttaaaaaagtagaacgcaccgagggggagtctttggagggaaccgaaatccgtgatacggaaacacaggaacctgttcactggggagaaatcttcttcaccctccataaacactgtgggctgaacaagtgggagatttgggagtacacactccctcaggttgcggagctgtgcaagtcagccgagaaatatattcaatttgaggttgagcttatgacagcacctcttcgcatgttcggtggcggtgggggcgaggaagtcgaagaagatgggaccgtcagacgtaaaagaaccttcaatgacgaggattacgcagagatatcagaagatgatatcggtatgcttgcacaagcgctcggaggataagagagagatatcccgttttgcctaaatgaaggtagaacgggatttatgcataaaggcggtgattcttttgactgaaacagaaggacaaggagataaacattccttaacacaagaaatattaacggataaggatcaattaactggacaaaacgcagtactgaaagagagttccccttcaggcgttagaacactgattagacgagtggagacaatcagaagtgatatgcagtcgcaaatgattgaaacactgactaccgatttggagcacttttatcgtggagcgttcagtgaaatgaaggatgtgtctgcagctggctcacaggggttgttagactccgtgatgaatacgatgaaatatatttcagcaggtgaaaccaaggggtattcatcaacactactcaagaaatccctggactcgtcgcagcagatggatcaacagatgagtcgggccgaccgaaatttggagcttagatcgtctgggacaacaaatgacagtgggcaattcacacaaaccggaacggtcaaaaatctgcaacgaattgcactgcaacatggtatagatcaggaagatgtaggtcttgcctatcgcattggttctcgtaattatgatcattcatctgaagctgtcgcgtttgctgaagaagtagccaagctgcattcagtgggcaatatggatgtagaacagacggcaacaggtctggaagctgttactccggcatggggaagcagtagctttgatctgtcccaagtcacagacatgatgatcagagcttcaacgatgttggatgttggcattcaggacttgatggatatgatgcgccagacccttccaatggatggtaaccctgatggaacgcttgcacaagaggatgcattagccaactggattagcaaggctggattgttggttcagtcaaaaggagatcatcctcagcagggctttgcatcgaatcgagttagattcgatcttcttgctgaacaagtgaaggctacggatgcaaacgcgtcgatccatcagcgcaccggtagtagagacaaccttcaattccgacaacgagagatcgaaatcgcatttcagattgcaacacatgaggcgatgcaagggttgaaagaggaatttgccgagctgggcgattatcttatcgcagtcatgcggttaattggagatcgtacgggtggcattgttgatcatatggaattgcttaaccgaattatggatgaagtcggtgttcaggttgcgtgggataagttcggtgaagtgatgaatgaaggcgatcagaagcgatacagtgctacgaatgcggatccagggaaagtcgaaaatacggggagcgatgttcccgagccacttcgagtcacggatgtgcaacgtgctggtgtagcgcaagaaatgggcagacagcagagtcgtctgcagacgctggaacatcgcagaacagaaattcaaagtagggccgcctccaagcaagatgatgtacttcaggcacggactaaccgagatcatcaacataaaatgtacaatcaggctatacaaaatggggatacagcggcttcttccattcatgcagaaaaacgtgacgaagctgagaagcgagtcaaaacgtatagtcgagaacttcttctgttgcgagaagaaatgcattcactcgatattcagattgcaaagacgaagcgaagtcttgagtttcttgggcgagagctggatgacacgagtagagcaatgatgcaatttgaacaccaagctagagttttgatgatggcgatggatgatatggacctggatgcagttgaactacgaaacaagttatatttccttaatgctgagtttacatacggttcaaccgatgttcagcgctacgaatccgagatccagaagctgcgtaaacagtcaactctattgaatgacgttctcttcacattgagaaccgaagtcaatgagttaaatgcttcttttagacaaggcatgatcgatgctacagcatacatatccaaactgaaggaactcgaacaggttcagctagcgagtatgatgagtggtccaggaggattgttagttactcaaggtgcaggaagcgttggatcctctggatcccctggatcccctgttaaggatgacaaggaagaacccaagaacaaaacctttgtagctcgtcatgaagacctgataaaagatgtcatgaaagacgcgataatggatgaattcaatccggggggcgactcgaaaaaagggaataaaaacacacccaaaagaggccttctttccagatttaaggatatgaaagatacaggcaatcgcaaagcattttttgatagcaatgccccgatccgtaataaagatggaaatattcttcgagatagacaaggcaactcgattactcagcgtgacatcaatgcggagcaagctgcccgtgggattaaaacacccggaaaattttcgaaattagtcaaatccggcgggagattattgaggcctttaaaagctgtaccagcacttgggttagcgatgaccgctatggatgtcgtctctggtcttgtcgatccattaaacaacatgggtaagtcagaagcggagaagcagagtattcgcgcaaccaataaagaagagttggccaaagatttcaaggatatggagcagtcatcttttgtagggaaagtatggaaagggttaaacctggggatggatgccgctgtgtccggcacaatgagttcaatattcggaaaaagtgctaccaataacaagttcggggattactggaagggatttaaggcggtttggagtgaagatggcggagatgcagttgagaagaaactgggcaaggaatacaactacaagcaggagaaaaaagaagcccagattcaaatggataaagagtctggaaaaccgcctggggacaacaagcaacaacaacaaccgcagatacaatacattcaacctcaaatgcagtatattcctgctgcgggcggaataggaactattgctaacggttataggcctcagccgcaaagcaatggtattgatgaaatgatcgccaagattaatcggcagcttaacaaatcgacaagtgataacgaaaccaattaccaagtcactcgatcccgtctgttgattagtggtgttcgcgaagattctggtcagatgcgtgcgctaatggagaaatatttgcaagagaatatcaagttcttcgataaggccattgcaagtttacagaagacgtacgacaagatggctgaaggtaaggataaagatgaactgggcctggagatcaatgagaagaaacagcagaaggcacaatcagagcttgaactgaatggtgtcaaaaacagccaaattgatgagcttagacgaaagatgaatgatcagtttgagttgacgcagttggattatgataaacgaatgtatgatctcctggcggctaatgggggtaaggaagatgcaccagaattaattgcattgaacaaatcccgtgcatctgaaatgaattcacaaataagttcgatcaagcaagattggaagaatctgctgaatagtggtgtgtttaaaccagggtcaaatgaatatatggagatttttaaacaaatccaagcattgggtgtagaacagtccaaaaatttgtatgaaattagcaaaaaaatggataaaccgatttcttcattcaacattccagcaggtcttaaggtcatggattactttgattacatgacgacgaacaatacacataaaagtgtgatggttggctcaggtgatgtcacggttcatgtgaacatcgataatatgacaggcagcacaaaagatgtggagagacttacatctacgttggacaagacactccggcagaacagtcctggtattgcaaaccgaatggccagcaatgtaggtgcaagaatgggaagcaatcatatccccagataaaataggtaaggagggcttctgatatgactcagcaagacccgtttggcttagttaatgaccggtataaaagaaagctgtatgtagatacaggcatgaagtttgagccagtgaacggaagaattattgatccgtactcttcaccttcgcccaatccgcaagtgagggaaattaaaatgattaatgctccctcgcattttcatcagatgggagtatcttcgtacaaggccatcattaacatcctgtttaaggataaacaatcctatcacgactacgccatgtacgtaggctggacacacaaattttatgatgagaagggcaatatctatgttggtgttgtagagtccatcaaagttgaccctatcttctaccatcaggatacgatggataaagatcaaaaggggtacaaggtcgaattgaccatgaccctgatcaaaaaagatggttatgaccgtaagagtgcaatacagtttcaggatttacagacaacagaagggaaggaccactgggcaagagattccattgaacgcttggctgatttggggctgacggttgtaacacaattggatggcaccccaattctatatttcagaccggaaaactttataaccagagcagagtttgttactttcctgatgcgtactaaacgtttgctggaacgaacaattcgagagtagggtgacctactctcttttctgtctattctaaagataggaggtgtttatcatacgaaaatgggttgatgtaaacgaaggggactggttctataacgatgtcatggaagccacgaatatggtattggaagatggtgaagtctttgtggccgggatcaactacaacaagtttgaggaaggcaagccttttgtatatgaggaaatcaaagggaaagcggggcaaacctcatttagtctgcctgtgctgattaaaccaacagatgacaatccactgtatgtgtttattgatggtgttcaaacgatctaccaaacggctgaaaccaatagtaaggggttaaccgatgtggagttgtataccggtgtgaaagcaggacaggtggtgtccttctgtagttacggtgaaccgttactggacagtgattggaaaaggccacccgtgtcctggactggagatttgcccagagctgtacttagtgcagcgacgacctacttctacgatccattcagtcgtaatcatcaggaatatttgtatgcagcaggccaaccgcttcgcagactcagtattccttccgaggtatgggcagacaccatgggagatgcagaggcggtaaccaaaattgcaacaaaggctattggttaccgaacggatgtatattgtgtcagcccggggggctcggtatttcttccctttaatctgaacggtgttacctgcaagttcaattattggacgaagaataacaaattcaagagtgaagatataaaagcgacaacactcaaaccggcatacaacaattgtttttttcctaatgcgattatacagcggggagaagcatttcatctgattaataagctgcgcaaggtgttctatgccagatttacggacatgaaagcaccaacgacggggattaatcagcctattacggcatttcagggacaacgggtgtttagacttaacggcaattatccagcaggtaaaaagaaacttaaaattacagtgaaattcaaagatgaaaaaaaagataaagtccaagaaacaccggcttattcggaaattgacaaccatacggttgtcttcaatcaacctttctcagaaggcgacgaagtgacgttctattatctcaaagatgtgagcgagaggttcgcagacgttggcaaagattcggccatttattatcaaaccaaaggtgagcgggtagaacagtccaaggatgctttttggaaaatagccgtttcggagatggaagatgaaacatttgccaataatgatcctttgattgcaggtatcaatatcaagaaaaagctggatggtgcagcggtggtaactaatatgggcagacctgtaggtggtacggaaccggatgagacatggtttttgggtaactctgctatgacacgggctgaagccgcagcttttctggaccgattcatgaagtggaccatcgagcgattcaagtaagggggagattacaatatgattccaatttcggatgaggttataaatgtgctatcccagcgtctgaagctgggggaaggagcgcttcccaatatccgggtcgaagtagatcggctggcatttatcccgggacggacagaagagttcaggcatatcgtaaccgagcaggtacccatcatcagtacagaatccgtttgggtggatgagtcgagtaatggtatatataacggttcgactcaagcgaatgctcaggagattttttttccggttaagggtaaaacgattgatagtattacagttacagataattttggctctcctcgagataaaggtacaagaattcataaaggtattgatttgtttgatgagattggaacgccgattttggctgcatgggctggaaaggttgttcgaatatcctatagtaaaacaaagggtgctggtaatgccgtaaatataagacatgcaaacggtgtaatcactaagtatttccatttaaaagagatactctgttcggtggatgatgaagtagctcaaggggctgtcattggaacactaggcaatacgggtggcgtatataccggtggtcataaggtgtctgcggctgaacgtgcggtgggcaagggacgacatctacattttgaaatttgggaaggagtcaatccaacaacgagaactggagaaggtggtaaggcagttaatcctcaattgtatttcaagggacagcgcaagttgcacggaaatgcgaaaacaacatttactgatgtaaagccggttcaggttgaaggatatcccggagagatcaaactgaatgagaagttcgacaagcgaaactggcatgagaaaaacgtttatacaaccggattgaaattttcggattatgccaagattgaatcgggctggactatgtttgattcaggaggcaagttgctgtatacgtttgaaggcaaagccgccgtagctgaatttgagattaacgtgacaaaactgagtatgcccacgcaggggctgcttagtattggaatggggactaattttagcgatgcggaaggggattctttcgccgtggtgattgatggtaaaacgtatgcctatgtgaataagtttaacggggcatatgatctgaccaaactgacggaattgaataatattgtgatccctgcaaaagccaagagtatcaagattaaggtgacctatggtgggaaacaaaaccccgctgtcccaaccgggtctgttcctgcttcgagtaagaagtataaaaagttcgccattgactatattcgcatacaagagttgtcgcctgctccgttgaagaatcaaaagagtgaagaagggctcgatccatctaaaggatattatcaaacgaacagctacacagattttatcaataatagaaggacagagacggatgttattcaggtcgggtcttttgtctatatggacacgcaggttcttcccaatatcattagtgccgaaattgatgatcagtttgattctgaagccagggaagcacgactgacgatctccaatccgagaggattcttctctccggattataatcctgctcattttcccgagcttggtggtgtaccgtctccatggtcttattttgcaaacggattccatatcggggttctgagtgaaaatacaccgatacgcatatatatgggatatggtcagcacatgatgcgggtatttacgggactgattgacaaggtggacatcaatggcgaaggctccacgctggagattacggcccgagatatgtacaagcgcattatcgagaaagtcatttccgagaaaaaagcctatccagaggtagaagagattgataatgtgccagatccggtgccgcctgcagcagctggcacggaccggacatcatccataattcaggctgcacaggcccaagctgcagtgtatggtgtgcctgatcataagtttttgcttgcgatatgcaggcacgagaccgttctcggaacacaggggaagggtaaagatgagaacggcagctttattcttggatatggctgtcctagtgagggaccgtgtactgataaatacgcaggtattcaggagcaaatgaagcgcggagcagaacggatgtccaaagcactagcttccagaggtaaaaaagtgacttcaaaagccgatgtactttatttccacaatggtggagacattgctcccatgacctggagtcaagatcgggagaattgggtggacaaggtatggacctattatcaggagatgctcgcagatccggcaagctggaccactacagcaacctccactccggcagttacaccaacacccgctcagcctgtagaatttgaaaagccggcttgggtcaaatcaacggttgtactagatctggttaaacatgcgggtatggtgggttggagggcaaccagtgaggatcgctcttatcctgactacgtgattgacgagacctatctgattgaagtgaatcaaaagacgggcagggtcattgtccccgtaccgggtcagaaaggtgagtttgaagtcaaggatgcaagcacagtgctgacaccgaatggatggcttaatccatttattgaggagtatggcaagacgtttgagcaatggtctgccaaagttacggaagctgttcaggaggtgatctcggagattccgtatcgaagctactgtgaccgttatggtacataccgacttgagcgcctgaattatgacaaacctgtcgttgcagagttttccgagaatgacaatctgatctccattaccaaatccacggattggtccagaggaagaagccacattgttgttattgactcgaatgatagtcagagcagtttcgtagacaaggagattttgctcgaactcaaaggagaaatccgaaccatggtgctggccgttccttgggcgaagacggttgaagccaaaagacaggtggcagagcgagctttttttgacatgaaacggatgtgccgtacgcttcaggtatccattcctgcgaatcctgcgcttgatctgctcgacaacgttattgtgacggataaaacgaccaccacacgagctgtatatacgattaaaagtattaaaaccagttattcggttgaccgtggtatgttacaggtcattgatatgatgtgggcaagaaagggagtgatggtgtaatggccggcattgtgaatgaaaatattgtatttcccgtgctggatttaatccaccgggagcttcgcaaatatagcagtatctccaattcgaatgtttctcctcttgaaggtgaaccttccgttacattatatcgggagcacatgcaggacccggacagggtgactggagcagacctcttgtatgaatcggcatggaaggtttcgatctggatgaagtttggctcagaggatgaggaagactttccttccggagtgggctattcccacccggattatgattattacaagtatttcaggttaacgcaggtgacggcccgtacatatgatccagctggagagtcgatgttcacttacaatattggtctaaattatgatgacgaaggacgcttaactggaacgagcgtaagtcgtatataacatgtaggaggtggttccatggcatttaatgtatcttacatcgcgggtggcgtcatcgacaaagtgcgcgagctgccgtacccacacttcagtaaaaagacgatcccgttcattcggggacagatgttggacattccggcggccaagaccaccaagtctgatacgttcaccttggcgtatgacacagaatttctgagcattgcgtttgctgcgagccactactgtgtcggcgattactgggagctgatgatcgggacggagaaggtatgtcataccatctatacgaaggaacttcccgaatcagtttctatgggtaacagtttcggaattgtctacccgattccggcgggaacgcccatcacgtttgacttcttcaacgcggtggctgaagccaagtcggtctggtacaacatcaaatttttgagataaggagggtgacgatggcacagacagtaccattaaccaagttcagtgggttcgtgtcaggcgaaagtaaagcagaggatattattttcaatctggccgatgccattgtaagtgcgaagattccatccgctaatggtttaaatgtggaaaacaaatggaaaaaggcctacgagtccatgtcggatgtatgggtgacttacaaagagatgacccgttcgggcgtgcaaggaaaatataagcataccgatgggaagctctatgatgtattgaagattgcttctaacttaccgagtctgactaagacacaagacggcacttctttagtggatgaagaaggattcctttctgaggtaagttcatcttatggaaacaatccaacaggaaagaagattcaagttgtttcatttgaatacattgatagtgtaggaataactcagtctgtaatggttccaggaagtcttgcagtagtacttcctgatgcaaattctcagtggggatcaaaggtttatcttgtaaagcaagttcatgtgaagaagaacggcatgaaggttgataaacttgactggaatgaatttgaattgcttacggaactcccgaaagattgggattatgcactaacacagtcgggatataagttcagagttgagaaaaatagatatatagttaatggttattataattattcggatcaacagcccattctagcggagaaatacactttcacagaacgatactatgttgccgaaaaaaccagttttactaagccaaaagttgtgttgaaagctacaccagatgtaccagaggggatttcctctcgggattactttatcatgtttactcaacctcagaactttgtgggtggagattataattactttgactgccagcatggtgtaggatttgtaggcgaattaagcaagggtgatccctcagctacatacacaggcatctgtaatccctcaaccgtctcacccgggtctacagctgttgtaatggatcagacagcagcagaagcgatgtacgagcagtggaatgatcccgaagcaactaaactgtacacaccacccaccatcacatgggacaaggattttgatggtcttactgaactgatcagtccagcttcccatttcttttacggacgtaactcgacagtgaaatggttgccaaacaaaaaacggagaccggattacctggtagcctaccatatttcggtcaataacgaccgagcagcggttgtcattgaaggagatccttctccaaatattcatggttattaccgtagtttcggttattttgggaaaatcgtacctttcaatgatcatgatcacattggcaactttggtttaaccgtaggtatgggagacttgaaacaggatctaacaggatataccaaaaatgatattcgaacggatttaaatccggacaaatatgcgcaatacggagagtatacttcgaatggaatggactcggtatctcttctccgtactcgaggtaatgtactttatcaagctcattatccagcatttattacccagctgcccaattatcccgatgttgggagtatcccaaaagaactgtctaaactaatgttagataaggatggtttccaaaagtcactatggactgggaaataccatgcaagtccagtctatctggtgcaccaggcggaaggttatcggggttatatggatggggttgttgcgatatatgatcagaatctcgttaatctggacgaactaattgtagatacagagattcccaaagataataataacccagcagctggtaattggacggaagtgtacaaattcttcagtatcaaatcaccgatgaattttttcaagcagtcgcctgctcctgacctggtaacgattgcaatacttaaggaaattaaataaggaggattaacattacatggcaaattttaagtatgtagaaaccattacaacatcccaggatcttctgaacaagttgaaggaggagattacggctttcgagaaattccccttcgaatcaacagcgggtgaaacagctgagaataactcgtggaaggtgttttatgaggaaaaggatgctgaaaatcgtatcagtctgttgattcttcaaggcaccatgactatcggaacaacagaaaaaccaatcaccaaaaaatattatgtacagttcacgaatcacgccatcgttccacgagtgatcacaccaacacctaaatatgtagagcatagtacattgacggtccaattgcttgaaggactggaaggagaagagcctgctgctttgccagtgaagacactgccaacattcaaattaacaggtcaccctgtactgtaccagtgggcactggagagtcatacgccaacggatcgaaacaaagaaaagccggtttacatgtatatcaatgtgatgaataatcgtctggctatggttctggtcgcagatccggctgtaaatttcctggattacaaaaaatcattcctctatgtaggtgcgctgaagccattcaaatacaacctcaatgatgtagacggaaacgttatgctgacggcaggtgcagttattgatgaaccggatatcgcaacaatcgccaaagacggtacatactactatggacagtatacttctgcaggtaacaacacgttgcagatgctcaagactaaatcaggtattgaattccaaagccattatccttctttcattacacaagcaccaccagtaggcaaagcctttattgatcctgaacttggggatacgggacttgaacttgaaccacagggtttccaggcatccaaatggacgtccaaatatcacttgtctccaatttatgttgtccacccctatgagggatatcgtggtcagtttgacaactgcattgcggtaacgaaacataatatccttcacctggatgagttgattattgacgtggaaggaaagccttggcatcaagaggtttatcgttatttcgatacagatacacagcagaacttcatgaacttatcagctaatcaacgtatgggcgtagcgattctgaaagaggtacgttactcaagtaaacaagcatagacctgaatcgtatagattcagtagagggaaccctgactccgctcaggagttccctttttatttggagggggtgatgcagtgctcacaacaaacgaatactatttcagcatccgggacattgttcagacatcacagggatatttgctcaggataggcagtacaggaagcaggcctttggactatatgtttgtatatattccttatagtcgttatgccagcatattgatgctggatttctacatggcaaggaacgctgctgatgatacgataaaagacgaattgattgactccatcaaaagagacttggaaggagaagaacaatttatcgttctgtctgatggaagaacaaggaattctgtatcgataaacgagataccttttggagacaaacgaaatacggtaaaaagtgagatcgaagaaggcattaaggctatgcgtaatcgattaggtgccgatgagtccttagaagcgattgaaggaattcgaacatctcttcgagatagcaatcttatggataactctgagcaaaaggctgctgatcgagtgcagtggctgcatcagggacagttgcatacggaagatgcagcatggcgtgttgatgataacaaagaattgagaatattcaagaatgttacagtgacacgcaacttgctgaaaaatctggacaaaattcatccatcccaatggggtgttcgtttctcggatcaggatgtcattctggattatcttggagattacgagcgagatgatgcagttgaaaccgttgttgaacgaatcatggcgtcagccagagaccatcagaagcatacccggcttgagatattagcgatagccaatcggacagtttcgatgctcacggagcaaatggtgatggatggtgctctgaaagaaactgagcgacgcagcatcatagttagagtaattgacagtcttaaagagagactgaaagatactgcgatatccaagctggacttgggtttattaatgactcggcgtgaactcgatgtttcatatggaaacatgctaaaagctgcaatagtccatcatcggaacacattcaaggagtttatgagtaactcacagcgttcctataaacgggattcaagcatagatcacgacatacgaatagggaattcttcacgttccctacaagaagaatatatgaaaattgtacatgagcaaattctctcttcaatagatcatacgagagaaatcagtgttcataagcaagatcagggtgaaagaaatcttcaggtcgaagggcaactggctcagttcaatcaagccttgcggaatattgattttgaaacgcagatgcagtacgtacaacaatgggggcaacgcaaagatttcgaaaacgggttaatcatgcgtccacctgttttggctaaactgaaaacacgccaattcccaagtgtggtacatcagtctcttcgaatagaaagagatacgaataaagaactgcttttagcggaaacacagttatatagacgaagcgcagagcatgatattatttctttaaacgagatcataaatttgaatcggagccgactgacagcacctacctggattaataaggaaggtctatggggaagcatggctaaaggtgtgcaaacctatatggacagatcttcagccaataggtatcatcctgcatctgcgttaagagatattcgtagtggtccctgggtgatccaaaatgcttttccaagaggacaacgtattataggtcataattcggcaacaatagatcaggaatttccatggggcaaaagaatcatagatcataatcctgcttatattgaagatatcaatacgcaaatcaaggctcaccgacttattgttgtacttggagcggttgaggacacgaataagcaaattcttgcatcaagggatgctacggagttcggaaatgtcttgcgaaataaacccgaagcacatcgagatacagtagaattcgctaatgttgagagggataaacctgagggcactcgggtagataaagaagctgcacatctccttcgagaatattcagaaggacgcagggtcgacaaatttgaatcatttgtatcttcccaattcgatacgggtcatgctggtccgcgagccatgtatattcccaaaacagaagtgcatgccgagcgaacggatacatatgagatagaattaaaatcctcaagtgcgggtaaccgcattactgagcaaggaatctggttaccccaagctttacgtggagaacgtgaagataagatattgacgattgaagatacggtctacgaggcgctgaagagtagggatagtaaaaacctttttcttgacgatgagatgtatgtagcacttaaaggcagcaaagagctcaatatagagaaattgtggcaatccctaaaaaatatgacgcagaagcatatggtttacttggatgacttactaaaaaagttcatcagtgatggtggaacgattggaaacaaattatatccgggtcatctggaagattcattgctggcagctgaattattagaacgccctgcgcttgtattggagatgatgattgatgcggtgtatcagaccgatgatgtcgcctttatggatgaaaaccttcttactggaattcgagagaggatcgatgcattaattgaagtgggtatcttgtgttcaaataaacaaagtgataatggactcgttacattcagttcagagggtattagagaattgaaacaagttatcatcgacacggacatgccagaagcatatcaagagcccgatgatgcatggacagacacaccatatctagatgcagatcacctaccccgtcaggggaatgtagatgataaaatgtccgagtccttcaaggaaaaggacagtgagtataatcaagaagggttgctgaatgagcaaaatacgggttcaaagtttgatcggcgcggagaaaccatcgaggtgacttatgcggattgggatgccaaaccgattacttttaattttgatactccacttggttttgttgattcatctccgggagtttttgatgaggatctatcagaaatgaacgctgctcactcacaggaaaagttcggcatggtgaatgaaacagtcgatggctctaatcacgatcgagatgggttatttaacgagcaagattatgctacaggagaatctatccttcggtcaggcgagcactctaatacatacgttgcgggttcgacagatctgcgagaattgcatattagcgaagagtactccattggtgcccgtttcagtcaacaagcgcatgtgagtgaggaatataacttaggcagtcctgttagtcgtgagcttcaacatactggagagatagtctcaggagcttcttcacaaatgagaaaagcacaggtcattcagttgtatacctccagtacttctggaattcgtcaagcaaatacaagtgagggatatgaattaggagatccacttttacgccaaggtctatctagtgaaggctatggccttggatatcaggatttgcgtgaaatgcaatgggatgatggttatatgggggaaacgaatcatcgactgggtgtaacagcagaaggatcattttacagttatatggaattaaaacaggcaaacatgaatgacggaatgcaattggccatgaactcagaacgattgtcagagcaatcaggtcgagttaaacatgctactcaattgaaagattcatgggtgaatgaagattttctgggtcaggtatacaaacttggtaacttggaacagcagtggatagctgataagccacaacagggaaatctggagagccagtgggttgctaccaaatatcaatatggtttgatggatcagtatcttgacagcggggataaacctaagtacgcagacgtgccagtagaatccattggaggtttgccgcttaaatatgggcagattgaagaggagttgcaggcaactaaataccggtatgggaacttagaagagcagctactcggaattaaacctcagtatggacaaattgaagaaatgctgttttctaccaagcctcaatatggaaatttggaagaaaatcttctcgcgactaagggtgataaaagttccgaatatcactttaccaacaacggagataaacgtgcaagagattcgtatgttgaggaattacggaacggatcaaagagcgagcgaaggacaagtcttgaggaagatatagcgggaattctaaatcctcttcgggctacatttgaatccggtttgttaagcacaaaaggtaattcccaggctgattgggagcaatctttagtgagtgacaaggcgagcaattattcttcaattgttactatatctgaagcattaaaaattcaacagcatgggcatgtgggagagcaattgaatgctagcaagttggaacaaggtgcttctcttctagatggttcagaaggaaagaaaggacatgtggatggtgaattaatcgattgtacatggacaggcatgaactcagggcaccacgctaatgttggggcaggattatccgatgaaaccggaccacttgattctactgggcaatacgaaataacgactgcatttaagaatattcttaatggtgaattaaatacagaagatactaacatgtcaatcaagttaagtggatctggacaagaagtggatgatttttcatatacagaatttgagggcagagtggcgcttgttcaacaggatgtcatcactgcagaacgagaggatgaacgaatatctcatctggaaaaccagacacgagaggcgacatttgcgaatgctcgtttgtctgaattgcagaatccggaggatacattcgcaacctttgaggaacgatgtacgcaggtgatcacgggctttattttcgctgaacgacctgagatgcgtgcagagtatttggaacagctttttgcatttttgcctgaacgaacagcacatcttatgaagatctatcacgaagccaaagtggaaggtcgggcttctgatgttgaagtcgattcggtgttggcttatcgggatcggattactgagggatatctgcctcttatggatactaccgcggagggactcgttttcgattatacggataatctgttggaccacggaatgaatcccgaagactgggagggtggttttggcgtgcccgaagagtatgatcctcatgacccgtttaacgtttatttcccatactcaaaagagatggatgcacttgaacttgttcaggcggatgattgggttcaattcggaggcggcgattggaaacgggatgagctcctcggcaagttttacagtaaaaatgaaacttctcaaatcaacgggtggtaccgaaataattttctgggcgatcagtataaattctccgttgatttcaaggtagatgagaacgagaagggtgacgatggcgttggtattatttttaaaatgcaagataccaataactattggatgttcatggtcaatggtggtgattctacaaatgctctagatatgaggacaccgatgcagctgtatcatgtcgtcgcgggtagaaaagagtctgtaggttctccgatgcaaccttttaaatgggagagggatcgatggtacacaatctcagtatccatcattaaaggtaaactgcaaatctataccgattccaaactacaatacgatttaacgggcactgattaactcagtgttctttttttcgtatagagcgagtacgaggtgattttatgggtcatacatttggattatttacaatgtctcaaaaaggcgtgttgttcgccaatatgagagctaagatagctgataaagacgattatgccaatcctaaccatccagagcatctccctgagagtcccaatgcaccgagaagtgaaacggaccggcatggcgaagaaaataatcctattctgggtgatccaggttacggtcagatcggacgatggcagacggttcaattggatgcactggaaaacagtattgatcaaatcattgagcaatatctgagagataagtcttggtatgcgagtgtacgatgccgtgaagcactgtggaatatgtaccgcaggattgaatggtgggtagaacagcagcagcctccagataaaacacaatatcagcgggtactgcagatgattaaagattgtattcacaagattcttgaaaatgctcagaagcctggcggtagtcatcatggtgtgtcattgcccgtctgtccggcaccctactaccatcattttagtgggaattacttcaatcattttgatgcaaccgtatatgagatcccgctcttttctatgaaaaaggatgtcccgttctcgactaaattccctgatttcttcagatatgtatcatcaacggaggatcaggaatgggtagctgttcactctgtaggccgaaatgaacaatctggttcagagatgatcttaaaactggatttagggcttttggagattggcaactcatccaaaattacatttaactggcgtgtgaaacgttatggacagatcaggttcaagtacctggctagtgccaagcgcggtaatggcatgctgttctatattaatgggcagcaagttgggggcgaatggagcgagaatagcggatggcaggaagcggcttttacgttgcagccaggacagatgtacaagtttgactggttaattcgcaaaatgcgacctgaagtatggcagaacaatggcatatatatcaaggatgttgaagtggttgagattgtggatacacgcaagccgcctgcgcctctggatattgatctggatggggagcaaagtgatagtgattggtatgtaaagtcatcacaaagcattgcacaagcccactttcaagctcagttcattacagatgaagagcgaagtaagacgatgaaaatgaatttggataatgaatgtgatggtacagtttcttttgcttactacatgggagtagacaaagaatcttatccagctaaagattatgaattgttttttgatgacacttttgaatccagaactcaacatggagaaagcaggcatggtagtcatgctcaatctttacacggtgtagagtggaatctcaatgaggaatattccgaaacaacagctaatcaagccaagattgaatacgaaattataacaggccctgaggcgactgtagatttaagaggtgtagttgaagttatatgtccaacgtatgagattgatcattgggaagcgtcgcttcatagtcaggggattgggaattatcagtggcagatgtcgggcagcccgccatgggtaagatcagggaatgtattaagactggatgaacctatagaaggggatatgattgctcaaaccgaagtgaacttgcaagatgagggttggtttttatttagttattctcatcaattacgagctacggaatcgttcgaggtgaccgtaaatggcatgcttgaatactattcaacgatgcatagccagggggaacagataagaattccgctagaggaaggtttaaatattatccaattctatattcgagattattacactgagcagcctttcatcgataacatagaaaaattattcacgtacgggaacaatactggcaatacatatcgaactgtaactgatttaggttcgtacgttgatgtgacacgtggatgggatgtaacagatgcaggtgctagaactgaaaaatatggcgacacgattagatataatgcagagttaaatcctggagctaagtttagcattcaagagcatatgcgtatctatccagcgatggactcgtcatacgatccagacaagggggtaacaagagattttaacgtttttgaagaattgtttaatgaggaaggcaagtatcatgaagcattaagattctctggaaattgggtgtggaaaaaaattgtgaacggcgatggggtcatgtgggcacaggggcatgatcaggattttatatgtgattttgaagctcatttagtcaattcgggttacatctgttggcaatatggagggcaatttgatccaggagaaaaattggaattacaaattgatggtatctctgtatggacaggaagccagtcgaatgacagagaagggaccaattgtatgtatcctctaccatcggggaatcatcatttccgatggagataccgagacggtaaaaaatatacgccaggtaacggagatgggggttcggaaaattccaatggaacaggtacgggaactgatcagcaaggcagtgcaaagaaagatccatatggagtgaagtgttatacaggagattcaaaaacggataacatccaatacgcgcaaaaatcatatggagggcattcgccccgtgctgctaagtttgatgcaatcaatagaggtgaagtttactcatcctctggtcaagcgtacgcattgggtgttactaagcaaagatctacaatcgttcgtacgtttactgcccctaagattggaaatttcaattactctgaattgttgacagtctatccagtaaccaaaaaaagagtctttgtgaagagagcactaaataataagagtgctcaatatgatcgtgttgagactatttacaaatcaaatgatacagtggactattactcattggatgtttctggtaacaacccgcaaagtcgtgaatatagtttatttggtccagataccaagaaaataactttcgaattctattgtgttgaatcatttgatattaattttaaatatttgtgttacctgttgcaagattcaattcaagctgggagacttagggttgcttattatcctaaagacaaagcaagtcaagcggtaacgattcttgattgtaacgataattatggagatcaaaaaggatataatagcaagaatattgatggattaaaatggaaaaattccgaaaaattttctattccaattacagttgagaaacctggaaaatatacattaattataggtcttactgatacttataatgggcgtgaaagaggaaaagaaggtaattactattacgcagccatcaaagaccttgtggttcgtactgacgatcctgatggtgtgaatcaaaataaactgctaaatccagtcttagtggatcgaacaacttatgtgaatgtgcagtggtttgatttaacagacaaaaaaaacaaatttaatccgattaaaatatccgttgaaaatggtcaaaaagttagcgattacattaacagccctccctcattagtacccgggcacaaatataaagtagtttacacacttattaaagataaaacctcaaccaacgcgacagggcttgatgcaggtggatttacattaagtgaaggtagtttttccgagagatggcctaattactgtattgatgcaagtggaaacatgttccttgagggcaattctcctcacccaggcgaggagccatcaagtccaacagacaccacaacaccagatggtgggagtcatgcttggctagatgttattcgtctataccagaataacaacagagcgtgttcagggacgaaaatcgttattgataccttcgaagaagggcattttcttcactcccgagatgtgacgaatcaagaagacacattggttacaattgaagtggaaaatacctcagatgagaagcgtaagtatgaagttcaagttcgattcgagcaggactgcccgggagatggcgcaatgatctggggagggaaactgaatattgatgacattattaaattagatccatcctgggctgaagtgacccacttcgaagtatgggataacaaaccaatctggatgggcggctgtgataacagcaatatgcgcgtgaaaatcacacgtgaggacggaaaagtgttatgggatgaaaagtattacggggatgggtatcgtggcttcgaactgaatgatctagctcctaagccttatagcaagtataaggtggagattacaacagatcagaaggggcaaatcagcgattggacaggaaaacgatatctgaccaccttcagggtacatgacttcaaatcctacgaaagatgggtatgggtgcctgagccgtttgattgtcaattggatttcttcattgacgatgaactgatcaaaacattcacccaagagggtggatactatactttttcacatccagtgcccaaaggcaaacatgagttcaaatgggtgttcacctcccttcaggaagtgggtacgcgtagctacgaatacgctaatctggactggatggaactgaccaactggatatgtgatgacgtctatgtcattccttactgcgaaggtggtgggggagacaagtgtgtggaagcactgattaaatgcctgctggaagtttggaaagcaagacccaagatgtgtgtgatcggtaagcggatctggctgtttacgtaaagaaaggaggatctggatgggaattgtgaaacgtcaggaaaaagggttaatctattttgatgatttcaataaatccgaacttgactcagggtgggaagtattgactgacgatactggaaggtacaatgctgatcatggggtacttgaactaagacatggagagtctccaatatatatgtttttcacggagttaacgggaattgaagagttcgtgttggatgtcaagaatgagtataatccaactgttgagggagactccgggggacttattgtatatgcagacgatgagaatgtggtgaaactggaagagtattttgatgcggaaaaagggatagcgagaagttatccttggatccgtctggtacgaagttttaatgtatattccgcatactggtcagaggacgggaagatatggcggtttattggtaatcaggaagtcatctcctctgtacctaagatcgggcttttcttagaatcaggaacacaaggtgaaccactactcattaatcatattcgaattcaaagaagtgccagagtgaaggtagataatctgaaacaaggctatcaggttgaactccgggatcaggcaggaaaaactcttgaaaagaaaatatgtaaatatgagaatacctccatcatgtttgactttcaacgatatggttatccgtttacaggcagctttgcagtgactttgcctgacggcaatagatttgagtcttcagacatattaagtatatacggtggcgatacatattactttgaacctagagtggatctttactatcgtgagtatagcgacaatggagaatttcttgacatgcggttacaagacaaccaggaacgtttcctcggttatatgtcctctggtcaatccgtaacggagaatgtattgtttattgccaaaaattcattgaaccaaggtgtttttcaaaatgttaacttcgagcttgcctcttatcggggagatcagtaccaaaacgtggttcggttagcgcccgatgttgagggagaaccaggagcctggagtatgcaagtgaacgcaaccgagataactccagaaagcccttatcaattctgggtgagagtagagaggctggataccagcaccaattatgaagcccaggtcacgttcgggatcaacgtttcttcaacgtatatatagctctaaactttaagtgctcgaccacgtatagattcgataagggttgagttggaggtgagaatatgtctgtccgctttagcgggacaagttcaggaacgaacaatggcaagttgcttgaccacaatagtttgttaaacaaagggacccgatcccacaaagaaattgatgagcatctttcagagatggaggaagccagaagcgtttatgtcagcctccctgagcgtttggaacagatggaacttgtaggcaaacagaatgaaacagggataaccgatcatgaattgcgtattgctgatctggaacctcgggtattgaatcagggaatattgttggaagaccagaagtccaagttgggtgaagttgagaaaaacgtaacggatctcagcatggatgttcatgaacaaaatgaacggttggagagtttggaaaatgaattaggaaatactcgggggaatcgtgaatcacttgcagatgttatatcagatatagagcattccattgatgaactaaaaacgattccactatctgatttagcaataagagcggcagctatcgattctaatggtctgcttaagcttcagatcaatggtggttatgcaagcattagcagtatactcgttcaaaaagaggagtccctctattcctttattgctgagcaagataccagatattatatatttctaaagaatgatggaacctttgtacatcaggtggttcccgatgaacccgataatggcatgattttgggatctgtcacgacaggtgcgaccttcgatgcggtatatcttaaagaccaacgatattatctgaccaaaacgctgtctacaggagattttcaagatctccaagaaagaatcacagatgctcaatctcagatcaatgaattggacgaagaagtggtcaggtggatcgatcataccgaagttttgtccaaacaagttgaaggttttggtgagactaaagctgaagtttcagatgctagaacagacaaagatggctttgaatttgataagctgccggatcgtttaaaccacatgcaatccaagctggagcttgctgcatccagggggacgatggaaaatcaatcaatttttcgtattgagtatccacctgatgtaaggctttcagaacaaaagagcttttattgtccaaagtatagtattggttctgacagtgtagaagtacttctggatggcattagggtaactcctggggaagattatatcgaatatgcggatacggaaattcgttttctctatgatattccggtggattcacgtgtgacactgcttagccgagggtcgatcatcaatacgtcttcaacatcagagtatgagtatgactccaaaggcagaatgaagcgtgagattattactggaggtattaaccgcgttattgattatgattacgatcttgaagggaatcttatagcggaactcattacggagagtgatgggcaagttaagacgataacctatgaacgggaagaaggaagaattagacgcaagttgaacaatggggcaatgtacttttacttacaaggaagttcagcctatgatgaccgccctatgaagcaacgtgtgtctgtgcttgaagatatggaagaacaggacgtttattttgagtatgacgctctaagcggcctaattatcaaagagattacatataacaacgatataaaaccattggttataaagattattgaatacaattataactctgatggtagtgtggataccgagatggtcgactttaatggttcgaaaataataaaaaaatataagtacgattcggatggaaatatccttggcgtccaaaaaagaaaggtaggctgatagaatggaatcacatttctcaatgaccaaaattaaaacgggatttcgtcctttgttcgacaaaatggtaggtactaaccttacgccaattacagaggaagaggtggaactcctgatgtttatgttgcggagcgatattatcttcgatgggacagggcagcagtatcttccgatgctggaagctttggaacaggtggttcctcttgaattaacggacgaaattaaccaggagctagtggatcaggatacacaacgtcaggaagtagatagacaagtgcaaattcgcaccgtatttctgacagcgctgaaagagtcgatgcttcaggaattgaaagttcgatatggcatttaaggaggtgagcgcatgacagcaacagtggtacaagggtttagacggtacgagttcacgagcaccgtgaccagttttttgagtacattggcaaaggagatgaatacatatccatatgaggatgttaactggaaagtgacttatttctcaaatgatccttactctcagccgagggcacataactctcggactagaacatactccagtccacaaggatcattaacatttgaaagtttaagaaactctaatttgtttttttcattgtgtttgaacataagtgtatttcaacacccttacgacaatagttggacgacttatggatatcaattgagatgtggactgaatagaccaattatagattcttctccataccctgacatttctttgggattaggagaggaagcaaatattccttttcatacagcaagtagtaacataactttaaacattacatataaatgggctgttttccctttaaaagaagcgatctttatttttggggaagcacaaaataatatcggttatgcatatccctttaggctttacctcgggaaattatcagcttacgagaaagaagactcaacagttgaaaaagattttattggagtattctcacatgcacctattgcgagtgacagtaactggaccaacagcctttataatgttggaagaggagtagtcaaagcttcacgtaacaataaaaagtatgaactttataatttctgtacaagtgctcaagccacctctcctggtccaagcaatcgatattttatttccccgtggtatgttttccagccccaggaaggggtccgaggtgagtttcagcaaatgaagtctgtcgtgtttaaagatgccaaccagcatccagacggaacgatgattgacctggatggtaagagataccatgtttttcacgttaacgatcagcaacaaccaacgagcatgaaatcatggatagactttgacgggaagggaagagctatccagccctacttttttgatagcaacatgcttctgggagatggacagagagccattttattcgaattaccaacggaggtgtccaagtaatgacagtacctaaacgatattcatgggtgagtacaatatcagaattttcgaacaacgccgaaatacagatggcaggtgactcatggtgggaagttaaaaaatatgctgcgtcggccgtcgccggtggaggaaactggggaaacgctgttttcaaaaacctagctgatagcagtctgtgtttcactatggcaattcaagcacagtcatataacgccgtaatcagatggggaatgatgaataatccaactcctaaggtggatgtttatacagattctctgggaaaagttctaacagaaacaccattctcagcaaacagtaaccaatataacgtcacatacaaatggactttgttcacaacgaaagacattatctttattcatggtgagtaccaaaattatactgggaatgcatttccaattcgaatttttttaggtagattaacagcacttgaattagaagatccagcgattgctaatgatttcgtaggtatatttacacatatgccttcaaacgtaaataataataacaatttagctctaggtgattttaatgtggggagaggtgttgtcagaaagtcccgtaatggtactttgtacgaatattacaactttactacagatgcccaacttacatctcctggggtaggtggacgatactacgtcaacccatttatggtattcaatccggtagaaggagtacgtggacaatttactgacatgttcacagcatgtttgaaagatgcttcacaacatcctgatggatccattctcgatttaggtgagaataagtattatgtattccacgttattgatcagcaaatgcctgccatttctattcatacattatggtatacatcatctaacagtggaagatattgcaacccttgcttctttggtagcaacaacgttatgggtgggcaacgagtcattctatttaaaatataaggagggtttcctgtatatgtcattcttcagtggtaaagtcaaaatgaatctgttgtttcaagcattaattaatggcttcaagggaattgcatcctcgccttggtcgatctattttgaaacatcggatatactcgtcattaaatcagtgggctcaacaggaaaagataagttatttattaaattcgaaaagggtaacaccaaagatacaaacggcaactacattacagttactgtagcggaggatatcactctggcggacggaagcattcctgaaggaaagatgtttagcaccaggaatttttactgccatacatctgttgtagattccaacctcttaacagactaccaagtatccgttacggcagatcgcataattatatggttggcgggtgatgtgaactccgtaactggaatatccaatttggggtatttcggtctgatgtatcgctattcccaagaaaatcactcgggtgctcaggggatcggagtgagctaccagggattcaatggtatacgtacagtcaaggatctggataacattcagaccaataacgtgtacaaatcatactccgcgatggtaccgaccaatccgggttggggcgcgctctaccatctctcaccatgtattatggccaataatgcagaaggtccgagaggtgaactgcatgatatttattttgcacctgcagcaggtgtaagccacggagatgagattacagtggccaataagacatacaaggtatattctctgaccacaggaggttcaagcttcctaccgggtaacaccgtagctgtattgatgcagtagaggagggagaatatggctgtagcagggacagagcaatccatttatacgccttcacaagcagtgataaagcgtaattcaggagttctttatacatatctaagcagtacttattattctaatagaacaaaggcgagctctagctatgaccctgagagggcaggccagcaacataattcaggagtactttacacatacgctcagggttcatatcgttccagggcgacgcaatctttgtccctgtatacgagtaaaagctctggtaaaacggggcaactgaagctcaagggagtccagtacgagtacacggttggaaagcttcatcatctcacttcagagaacccatcggagcaaaatatttattccatttgggggtatgatcaggaggagctccctcagtattatacaggccgttttatgttgactgacacccatggtgtaataataagccataccaaagagataagcatttacgatagtgtgggttatcttccagtgcataacacgccagaagctcgattcacaggtaatcttggtatggcaggttatcagggctctttaacaaagcaagcaaatggtcgttgggtacatgttaccaagattgttttgccttcaaaggattcattcaagggagttattcgatcaattattgtaggtcagagaacccctgcctcatgggagggtgcaaaaaatcaatatattgtaaagcacatttacaaagacgaaatcaatgagtttcaaggctatctttctggtcaaggaggcaacatagatccaactctaccaacaacgatattgccacgaaggtaccctgctacctatattccaaatcgcaggaggagtgagaaatgaacaaaacatggcgaattatgcaggagctgaaagatgtgtacaagcaggtacaattgtctcatgtagttgaagcactaaacggtgggggagaagcattaatcgtttcgctccccatggaaagcccgcgttttctgattaagacggtacgtattatcccaaccgaagaaacgaatgtggagcttcacatacttgatagtgcagacaaaatgaaagcccaaattttatactttaatacagcagaatttagtacaggaaacttcatagacgggatatacgacaatgtggatttaccttatgacgataaggatggtacatcccattttcattttgaaattattaatccaagttccgtgtcttcaggttttaccattgaagtaacgggtttgacggttagataggagacaacgatcatggatatcattacttatggtaaagtggtcaagctttcaaacgagatcaaggaagccagggaagatagcgggactctagatgctcgattggacaagattgcattaggtacgattacaacagtaaatgcaaaaaaagaccttcccccacaggggataccggaagctatttatgccgtactcacggatgaaagtaatcaaaatttgccaacattatatatgcatggcgaagaatatacacgccttacgggatctaatgttagctataaatctaatggcatcctaacagttaacgggttggaggtcatggtatacgagcatccagatttccatagtgcagacatcttagcagatggcattgagaagaaagtgtttactgctgaagaacgaatcaaattagagaatattgaagttaaggccaatcattacacacatcctgaaacacatagtgccgatatgatcagcgatggagaaacccatgtgagcatgacttggggtgaacgaaaacgcctgaatgtcattgatccgtgggaatcgatcagcgatttggtagattatacggatgtggttacatattttgcttttgacaatcagggaagagttattcgacaagtcgttacagacaactacaccgagcagcttgttagagaacctgtacttaccatgccggcttctccagaaggttatgcacaggatgattccttcttggtcatttcgattggtgagatatatcgatatgatggtctagacttcgtgcagcttcctactttggttgatgtcatctatcagtatgatgatgagggaagattggtggccaagtccatcaccaggttgggaacaacacctgttcaaactaacttccaatatatatatgactcatacggcaatcgtatagcggttaagaaatactaatacggaaggatagcatatgctgtccttttttttcttttaacaacgaaatagtttgtgtatcccatatctgcattgaagattagcattaacatttaactggtcaagacgtatagagaaagtagtatgagaacgtaattattccgggaggtagtatacgatgaatattgaacttactgctcatttctatttcaagggaagtgggaagaaaaaaacggtgaactggatagaagataatcctagattacaacagaaagagaaagattcggataaggtcgtacgcgaaatcccgttaactggggatgaggttaagcaagaatatcgccgactattcaccaaacacaagaacgaggggaaatcgatcacgttggaagatacagacgatgtggttcatatcattgatcttaccgatgtgcgaaatattgaattgacctctaaggaggggaatacagatgctgtacaggctgacctttgcactgaatgatgaggaaattgtcactacggagatgacatcggataaggaggatctggttggagctacggaagaagcatttgatttgatcgaaaaagactatggtgccaatgtcgttttgaatctggttgcgtttagcctgctcaaaatagagcttaccaatgaaatgataaattaagcgtaaaagctaactaatgttagcttttcagcaccaagtgttagtttatttgaataattataaaatatagttaataaagtgatataccccaagcctagttctggggtctattcctttttcatgaaaagttgatagtgacttgatttaatgcatccattgaaacttgtcttgtacaagcagttttgattaaactaggttgaattcatatgttcaggggcagtagaaggggtcaggatgattggcaaggagggatgggacattgagataaaagacttggaaagagagctcgcaaagttggcatccagaataagaaaagattttactgagcgcgggccggtagataccagagtctctatcatgaatcattttatcatcttaaagtttacagcaaaattcaccaagcctgaagcattcatgctggaacatatgcaatcacactcaagtcaaattttcgccgaatacaagatgaagctagcacatatgatgagagaagatttcaaccccgttttctcctatatcaacatgggtctgaagatcgaagacatcgacacaacattttttggtcatgattttgcagagcagattacagtcttcaagatgaacaaggatgttgaagtgctgctgaaaaatgatgagattaacatgccttaagacctattaactaacgtttgaatactggacaggttcttaggaactaattttgttgttgacaatatcctacatatttccttatactacccttatggcgatcgaatagattaataatcttgacgaagcctataaccttgttaaagaacttgaaggccatatcttcggtaattgggacgaaatagatgtcagaccaagaccgacacattccaccattttggtattttccagtggtgcgctctgtgttggtctttttgtttgtaaaaaatgctactttacctttcactgtatacttcgtatatagtcagtaaaaggcatataagcgaacgaaataaataaatgttgcgaacattagttcgtatttgttattctgaatgtaataggatgggaatggggaggcggatcaaagggagatttcttgattgtttgtgtgtaattaggcttattagcttcaattgtgtgtaacaagactacatatggtatatgagatttcgggagcaatagcgggaatatagagtaagatcatgctggatagcgactagattgtgaagaaagaatacgattactgataattaaatagttaatgggggaaatgaataatgtctgctacaactgctatgggttttgatgatttatttgagattggggatatagacatgttcctgaataaagctcaggagaagtgtcgtcacaagcttagaggtaaaacatttgccgggatggagaaagaagatgtgacccaggagattatgatcaaattagttaactccctggacaagtatgatgcagaaaaggccaaaatgtcgacgtttgttgatcatcttatcgaaaataaaattaaggacatgtaccgcaagtgtatgtctgagaaaaatctcagtgtggttaatgctgtacagatcatgtgcacggatcagggtggtggcgatgaatcggaaagctcagacatcgcattagcgcttggtcatgcggggtttgcttatgagaattttgagtttgtaacagatattatggaaaatatgaggctgaacgaacgtgagaaacaaatctttaagcttcggacttcggggtatgaatttgtagagattgcaggaatgctaggtgtatccaaggcacgtatatcccagttatggaaagcgattcgtgagaaatacgaagcattgtagtcataagtggcaattaatagcctaagttagatgaagatagattcagtaacctacatagaacagagagagcacccttaactgggtgcttttttatgtcgtatagagagattagtacagaaagaaaggcggaacaaggatgcttagtgtggtggttttaggattttctgtggaacgtctagaggggtattcggatatcgcttgggcaagtcatgattcttcgacagcttctgatttaagcaacagggagtatgccttgatcattgagaaagtagtggtacaggctgatgctgtcttggttaatctgggtatggatcatttgacctctactgatattgtgatcatgcatcatgctaatatacataaaaaaccgatcttgggtgtaggtttcaggccattggagcctgtcatcgaagattttgtctccaaacgagtggctgatctggacgtggctgtacatcatatgcggacgaactatatggtcttaagcagcggaaccaatacttcatctacggctccaatttaactgccgctccgataacacgtatagagaatgtaagggcaagaatattcgctagactttaactaatggaggaataattcaatgactcatatgatcaaagcaaaagatgataaattaacggaagaaatcgtagccagtatgattggaaagtatatccacgcgccgaccaatatgcatgaaatccagacgccaaccggcgcaacaacgaaagccaacgtatggtttgctggtcgtgtagctggttacgaaaaagccgttattggattcaactacgaagagggtacctttcatgaagaactacagacattttataacgttcatttaacggatggtatggggtacattctgacaagtgcttacgaattggagattcatgaactgaccgaagaggagtttaatcaactcattgaagagaaaaaggaagaggaacaagactcatctggtgaagagcaatgaaggtgttaaactacgcctcggatttagctgtaaaaacgtttgtgtccgctagcgctacaggtgtggaagaattaatcaacgcatggatgttatccaaaccacacacgttcgttaccggactggagtttacctccaccgttgatccatccagtaacacgttggaatttgcagcaatcattgtatatcagccaagtgaacaagaccaatcctaacgtatgtatgagattattccttctataatatagaggctttcagtaaggaggtgggcgaatctgttgctcactttagaaagagtaattggtattgttgttgcggtggtggtattagcttcacaatacgggagtctatcggcatcaggaaattacacacgcgccgacgaaaaaatagttgactccaagagagtaaaacaagcaacggaagcagagcaggtaaagccagtaaagccagtaaaaccaatgaagcaagaaaaacaagagaagcaagaaaagcagggaaaacaagttaaagatgcatcggttgctcctacccacatacaaatgacggatatgcttgagcagtatatagaactccaccatgagaaaacagtgagccgggcaaagctgctgaagtatgtgaagtgggcagtccactatacgaaggaaacggatatcgattccgtctggattctggcaatgatgtggcaagagagccggatgttagaggaaagtgtatcatctcatggagcgattggtttacttcagattcttcctagcacagcgaaatcgtttggagtgagtaaacaggagctacatcagcctgaaacgaatatcaggacaagcattatatacttggaatatcttatggataagtacgacggaaatcttcgtacggcaattattgcgtacaatcagggggagggcaatgtaaataagggaaaggctcgcccctggtactacaatcaagtgaaggaacatcataacaagatgcttcaaataatcgaaaaaggtcaataaacatcatttaacaatagaatttgaatactataagaccgtttatcaattttacatagggagatccaaatgggaaaatttccagaacatattagcacgaatttgcaggcagacaagaagtattacacaatggatgacgtagaaaatattgaacgttgtaagctcgatgagcatttcctcggggattgtattctggtcaatgagaacctgatatggcattccgttcataagtatattggaaaacctgaaatgattattaagaatcattgtgtggagaaggatgatattcttcaactgggccgtctgggattcatcaaagcggttaaagcatttgatacggggcgtggcgtaaaatttagttcgtttagtgttactgccattgtcagagaaatcagatgttttctgagagatagtgcaagcattattcgtccaactcgcacagctacggaattaattaaccgaatcaatcgacttgagcatgatatgggctacctcccaccagcacatgaaatcgcattgttgctggatgaggaagaagaaaagatcaataaagcacttcaagtgggtaaaggtgtgaaatacctggatgagcctgtaggtgctgatgatcaacaaactcaatctgtgacgttgatggataccatctatagcggggagaatattgaagaagatattttggacaagttatacgttgatgcggttattgattcggtcaagcgcaagcttagtgagaaagaagtgactgtactgaagcatcgtgttgaagggtttaatcaaacccagaccgcagatatggaagacattagccagatgagagtctctagaattatgcgaaaagtagctaaaatgctggataaaaaggatcaggcttgattgtcgtctaagcccttcatatcttatataatgtctcatacataacgtccctcccgcatccaagcgtgagggatttttgctgtttttgcccgatgggacatactccaagttgtccggacataagatagtacaagattccaagtgacccggaggaatgaattgatgcgaaaaataacgaaagtcattgcatgcatgcttatccctgtcttcttgctgtcttcattaggggctactcaagcccaggcaacgattcaaggtccgtctacacatgcgcaaagcgctgctctcattgatgtcacatcaggccggattttatacagcaaggatggggataaggaactgcgaattgccagcttgaccaaaatcatgacagcgatcgtagcgattgaacacagcaagctggatgataaagtgaaagtgtctccctcggcctttgccaaagaaggatcttccctctatctcaagttaggtgaagagatgacgcttgaaaacatgttgtacgggctaatgcttcgttcaggcaatgatgcggcctctgcgatcgcagaacatgtcggtggatcggaagaaggctttgtcctgttaatgaacaaaaaggcggagcaaatcggtctgacgcattctcattttatgaaccctcatggactggatgcagaaggtcactattctacagccaatgacttggcccgattaacggcatatgcattgcacaatccggtgttcaaacgaatcgtagccacggaggacaaatccgcaccgaaccccaatgaaagctgggaatactcttggcacaataaaaataaaatgctgcggatgtatgaaggtgcggatggagtgaaaaccggctacacaaaaaaagctttcagatgtttggtcagttccgctacacgtaatggacagcagctcgccgcggtaacgctgaacgacggaaacgattggaacgatcatgctcggatgcttgattttgggtttgaatacttcccgttggtagaggtcgcgaagcaagaacagcctgtgcaaaatacagatgtcgttacgggtcggggattctggtacccactggctaaaagtgaacaaggctcattgactaagaaattgatcctacacgaaaatcgaggacagtcggaaacggaaggcaaggaacaatcgacagatccttcgttcggattggcaggtcgcattgatatgcagcttgacggcaaacttgtgggctcaattcccgtgtatcgcaaaggcagttatattcctcctgaaccgaagacagaagatgcaacgctgggtggaatcggtgatgtctcttcctgggcagctgcatggcgcgccgtgttaagccatctgttgtctccttagctaaatcgccattgaagggaggatataatccatgattaatctaatttggctgctcatgattttaatcggatttgtttttgcagccgtcaacggcaatatcgaagtggtcacgcaagccgcttttgatggggcggcaatgggagtcacggtctgttttggactgattagtgtgcttgtgttctggatgggtatgatgaaaatggctgaagatgcgggcctcctggcccggattgccaagctgctcggcccggttgtgggcttcctgttccccgatgtgcccaaaaatcatccggcgatgggttatattctctccaatatgagtgccaatttgctgggactaggaaatgcggctacaccgatgggaataaaagccatgcaacagctgcaggagcttaatccggacaaacaaaccgcttctcctgccatgtgcaccttactggctctgaatacagccagtgttaccattattccgacaacgctgatcgccatccgcttaaactatcattccgccaatgctacagagattgtgggaacaacattgatggctaccattgtcgctacacttgctgctataatcgccgatcgctggtatcggaacagggctttacacaaaccgccgcgcatacagaaaagtggcaatcccggcatgaaaggatgagcacctttgttaaccttcatcaactggatctccgtctgggccatcccggttattatcgcgtttgttccattatatgcgtttaccaaaaaggtcccggtttacgaatcctttgttgatggggccaaggatggtttctctactgcaatcagtattattccgcatctcgtgggcatgatggtcgcaatcagcgtatttcgtgcctcgggtgcactggattttgtgattagcctgttcgctccgctggtgtcttggatgggtgttccaggcgaagtgttgccactcggaatactgcgtcctttaacggggacaggctctctggcgtttacaaccgatctgatcaaaacccatggccctgactccatgattggacgtatggcatctacgattcaggggagtacagacaccacgttatatgtgctgactgtctattttggggctgtaggcatacggaacggtcgatatgcactcaaagtagggttgttttccgatgtcattggttttattgctgccctcgccatttgtttgctcgtttttggttaaaagatatctcctttccttccgatatattagatatgctagaataatagcggaggagagtgagacatgcagaagagttggaaacgaatgctccgtgtcggaatgtcaggcgtgcttgctattgcaatgctcgcagggtcaacggggctggcggcagctcaagccgttcagacgatacattttacaggttacttcgataaacagctgcgtgcacaaatggcagtcacagcggattcttttccagtcgtgaatgtacgtttggtcaagcaggatgaacccgatatggtatattatgatgttggtacctcaatattgatctcaaaggatgaagtgctcacgaattatcatgtcgttcagagttttgctgaactgtctgatggtgatgaaggtacactgactgttgcgagtccgggttccttgggtaagcctgtaaaggcaaagattattaagacagatccagtgacagacatggcactactgaagctggacaaggagatagacgcccaaccggtcacatttacaaacgcaagggataaccaggtcgtctataccattggattcccaaaaaatcctgctggtgatcttgtcatcctggatgaagattttccttcaaccttcaatacgatagccaaaagcagagtgtttagttcccaagcttcggacgttccaggtaaaaagggaatcggcagtattgtgaaatccatggctcaaggtaattcaggtggccctgttctggatcagaacaaccgggtcattggtatgatgacatttgtgtacggtggacgtacctattatattacttccaagacattgcagactttcattaaagagagtaccacacctgccaaaaaacaggttgcagttgccggcaaagtttccaattaaatgatttgagaaaaaggcttatctttacgccatctgtgttcaacaggtcgtgtaaaggtaggctttttttgcgtcaatctcaaaggggaaggtagcctaaaatgcatattcgtgtcgccagtttacaaaatccttggattatccttgtgatttccctgtttgatgggtatcattagtgtgaggtgacatgacaaacatggaaagattacaaaaaattatcgcacaggcaggcattgcatcccgccgcaagagcgaggaactgatcctgtccggcaaagtagaagttaacggggaggtcgtaaccgaactgggtacaaaagcgaaccccgaagaggatatgattacggttaatggaaaaccaatccgcagtgagaaaaaagtgtacttgatgttgaacaagccaaaaggcgtaatcacaagtgcatctgacccggaaggtcggaaaattgtatccgactacctgaaaggtgtcaaggaacgcgtatatcctgtgggtcgtctggattatgacacagagggcttattgatccttaccaatgatggtgagtttgcacatttgctgacgcatccgaagcatcacgtacccaaaacgtatcatgcaacggttaagggtgtgccgcatggtacagctctggagaaattaaagacaggcattatgctggatgacggcatgactgctcctgcagaggtagagtacaaagatgtggatacagcggccaatgagtcggtcatttccattacgatctatgaaggacgtaaccgtcaggttagacgtatgttcgaggcaatcaaccatccggtaacccgtctgaaacggatttcgtttggtggtattttgctacaaaacctgaaacgtggtctgacacgtcatctgaccaaagaggaagtcaacaacctgattaccctcgcacaatcagaaccagccaaaaaaatgaaaaaaaggtaatgtgaggacacataattttcataaaaccgccgcagttttgtgacgaaattcgctataattgttcataggatgttcacagttgtcttagaccaataagatgcgaatgctacagtcacttaaaaggggagcagcacatggggaaatcaagaagaacggtgcaaatcgtcattttgttattgatcctggtgttgggcggatatgcgattaccacatcggtatccggctcgaatggcaagccaaaggaaggggacaaatctccttcttttgaactgctgggcctggatggtcaagttcatacgtctgatgagtacaaaggaaaagcgatggtgatcaatttctggggcacatggtgtgaaccttgtgttaaagaaatgcctgcacttcaggcgcaagctgacaaatggaaggaccagggagtacaatttgtcgggattaatgttggagaagaccagatgacggtggataattttgtacggcaggttggcgttacgtttccaatcatgcttgaccgggagaaaaactcggttcgtgattttgggatctctccgatgccaacgacattttttgtatccgacacgggcaaaatctctaccattcatatcgggcaacttgatttggacacactcgacgctcaaatttcgcaactggcgaagcagccctgacaggaggtctattcgtgttccaaaataccaaatgtgagtgcggacaccagaatccggtaggcacagtactatgtgaagcatgtgggaaaccgctgctggagtctgaagctaaatcggatgaagtgttggaaatgcgttatgatggcatggcgcgccgttcacagcgtagtaatcctaatatcattgaccgcatatggaactttttttcttccgttaaaattgccgtctatatgattgtttttacgcttgtaggttctatgcttggcacgatctatccgcaagaaagtacatttctgaatatcgatccctccgtgtactacaaagaaacatacggtcagttgggtcatatctattatctgttgggtttatcccatacatacgaatcctggtggtttattctactgttggtgctgattggggcatcattggtgatatgcagtctggatcgcgtcctaccgctctacaaagcactgaataaacagagaatacgtaagcatacgcaatttttgacaagacagcgtctcgtgtaccaaggtaccatcgaagaggcaccagaagactggattaagaaagcggttacgccgttgaaaaagaaaggataccgcgtgcacacccagggggatgcattactcgccgagaaacagcgattcagtcgatggggcccatatgtcatccatattggactcattatatttttgctggcggtgctcgcacgagggcttccaggtctgaatctggacgagcatgtcgcttttcctgaaggtgagatcaaaaagatcccgaatacatcgatgtatctgcaaaatgaacagtttaatgttgaattctacagtgaggaagaagtacctgagcaattccgtaacctcaataaaaccgttccgaaactgttcgaaacaaaagttgttttgtacgaatgtacagcagattgttcggatctctcgaagaaacctcagttagctgaggtggccagacatgatgtacgcgtgaatcatccattgaattataacggtctgaaagcatatcagtttgattatgatctaacacccaccattcggtccgtaacgcctgatctggtcaatacaaagacgggtgaagtatatgggccaattaagatcgatatggtagatacccaaagaacatttgaagctggtccttataagctcacggtaaaagaaaagtttatggactttggattagatgagaatggtcagcccaaatcaaaatcgccttcacctaatgcacctgcttttctctttctcatcaagggaccggatctgcccgaagaggggatacaatatctgtactttgcgaagcagattgataaacaacggtttcaacaagatgcgattaatcaacagctgattggagctgagattcctttacagctggaagtagacagcatggacaaggtcgatattattcagtccgtaagttatctcaatataagagtggataaggcaatgccttttgtgtgggtaggagccggtattgttatgttgggtctggtcatgggtttttattggcatcatcgccgcatctggattcgttttgatgataaacagctcaccttgggtggacataccaacaaaaactggtttggcttcaggcgtgaagttgcggccgtcttgaaacagatgaatctggaagtggaagagaagtcgttggataacggggggaatcaggcatgagtttattggatttcagcagcgacgcatttatcgtatctttctttctctattgtgctgcattcttgttatatgctgtcgcggtcatgggcaaaaaatggagtaatcgtgatcctctggaccatatgaatcgctggggtaaaagagcttttatcgcttcgactgtcgccttggcggcacatatcgtattttttgtaacccgatgggctggggcaggtcatatcccggttagtaacatgtatgagttcatgtcttttctgtccatgatgattatggttgcatttattgttgtatatgccatataccgcaagtcattactgggtttgtttgcgttaccacttaccattattattatggcgtatgccgctgtatttcctcaggaggtacagccattaatcccggcgcttcagtccatctggctgaaaattcacgtgacgttggcggcgcttggtgaagcattcttcgccgtgggttttgccgcagggttcatgtatttgctccgtactgttgatttcagtggtaaagacaagtcttcaagacgtcaacgaggatgggttgaattcaccctagttacgatcgttgtagtcatcggattcataggaacggtatttgcctttcgtacagctggttacgaggcggtttttgtacagaaaacggtcagcattgacacagaggtacaggaaaatagtacaatagagaaagtgatttatcgcatgcctccgatttttgcaccatataatagcgaagtggagagcatgacaccgtttcttggcatgaaaaaacctttacttgagacgccttcctggatgaacggggtaaatgccgggcgcaagctgaatacggtggtttggtcacttattgtaggtctgatcctgtatggaattgtacgacttcttgtgcgcagaccacttggacaagcgttacagccaatgatggatggaatcgatgctgatgatctggatgagataagttatcgcgcgattgctattggttttccgatatttacgctgggagcattaatttttgccatgatctgggctcagattgcctggagtcgcttttggggttgggaccccaaagaggtgtgggcattgattacatggctatattatagtgtgtatctgcatttgcgtttatccagaggttggcaaggtcagaagtctgcatggcttgcagttcttggcttcctggtggttatgtttacgctggttggagtgaatctgatcattgccggattacattcttatgctggagctgactaggacagactcgtattgcaaaggttgagtttagaagcgggaaacacaaatgtacctttttattgaagggtattcaaatattgttcgccagatcgaacataatagaagtgatgaggagttattgcaaaggggctggagaggcatggctgaacatgagaatcgaatactggtcgtggatgacgaagagagaatccgcaggcttttgaaaatgtatcttgaaaaagaaggttatgaaatcgatgaagctgaggatggggaaactgcgctgcgtaaagcaacagcaggggactacggtctgattttgcttgatgtgatgttgccgggtatggatggagttgaagtgtgtacccgtcttcgtcaggtgaaatcaacgccggttttgatgctcactgcaaaaggtgaagagattaaccgggttcaaggcttcgaagttggcgctgatgattatgttgtaaaaccattcagcccgcgtgaagtgatttatcgcgtcaaagcgattttgcgtcgagcttccgcgacagcttatctctccaaggagagcaattcgagtaacaacatcgtgttcccgcatctggttattgagcatgatgcccaccgggtaaccgctggtggcgaagagattagtcttacaccaaaagaatatgaattgctacactacctggcaacatctcccgacaaagttttctccagagaagaattgctcaaagatgtatggaattacgaattctttggcgatcttcgtaccgtggatacgcacgtgaagcgtcttcgcgagaaacttaacaaggtatcgcctgaatcggcggccatgattacgacggtgtggggtgtgggttataaactggaagtaccgaagtagttttagtttctggagatcattggtcgggaagttatggatcactattatctgccttgtgggttgtgtacttatagcgctgggtctttttttgctaccctacattgatacgaactttgcagaatccgaatccagagatattaagcggttgttcacctatatctgtattatcggattcagtttaaccacgttttttgcattgtttctattcactaaaataacgcagcccatgcagcaattgattcaggcagccaatgcgattcgcaaagggaactacggaacacgtctctccctggtaacgagtgatgagattggtgaacttgccaacacatttaatcatatggctgcccaactggaagataatattcgaaaccttaaccatgagaaggaacatttggcgagtgtgcttcgcagcatgaccgatgcggtggttacatttgatggtgaaggcaaagttattctgacgaatccgccaggagagaagatcatgcaggcatggtatgatctcgattgggcaaaaatggacgaaggacaagaatccgagcagtctgacaagacttcgcgtgatgtacctgagccccttcttcctttgttcaaaatggtgatggagcaaggcggggaccagaactccaatgttcacgtacagcaaggtgtctggtctgttcagatggcaccgttgtatgctgacagtgttgtcagaggggctgtggctgttttaagagatgtaacagaagaagtgcgactggagaaaatgcggcgtgatttcgtggctaacgtatctcatgagatacgaactccgctatccatgatgcaaggctacagtgaagcccttttggacggcatggcaacctcaccggaagagagcgaagaactgatccaggtcattcatgatgagtctctccggatgggcagactggttaaagacttgcttgatcttgcgcggatggaagctggacacacggacatggtgatgaaggaagttgacctcggagaactacttgaacgtgtatatcggaagttctctgtgcgttcaaaagaacagggaattcaactgcactttgagttcgaacagccaactattgaacttcaacaggcagatgaggatcgacttgagcaagtatttacgaatttgctggataatgcgttcagacatacgcctactggcaaaaatgtaatgatctcagccgagcgggtcacttatcttcgtgctccatttgtcagagtttctgtgaaggatcagggagtaggtatcccttcatccgacttgccatttattttcgaacgattctacaaagcagacaaggctcgtgttcggggagaaagtgtaggtacggggcttggtttagcgattgtgaaaaatattgttgatgcgcatcaaggtatgattaccgtcaatagtgtgcttggcgaaggaacagagtttattttgcaatttcctttggattcatcgaaatagcctgaatttcatacaaaaagtgcggaaacaccctcttatggagggtgtttttttgttgaagactaccgtttaatcttgttcaacgtggaacaagaatggtctttttttgactaaaaagagtgtccaagataattttccttcctatgtgacataagcttgaaaagcaagcaagatagaggaggattgagttaagcatgtccgatgatcgaaaaagggtcaatattaaagctttcctggaaggcagatcttttagagcaggctctccgtttattccaataaccacaagcgaactggagcagtttgaatccatactgcgttctttggctgtggctattcctgctgcaattagtcagccgacttcagccaatatactgtcattacagaatggattacgccagttacttacttttgtaaatcaatccggatttcgtgccggagtaaaggctgaattacaagccgtattggaattaacgattgcaggttcagaggttgtccctgttcctcttattaatctcgcaggtaacttgcaaaacttactggatgacttgttaagtgtgacgctgcttctggaagtacctcctgcagaaaaagataaacttgtgggattaattcgatcgatctccatatcgctaagccgtgcgacgacaactcttggaactggagggattaccggaccagccggcccacagggagtgccaggagtcccgggggtaccaggtgtcccaggagtccctggggtgaaaggggctactggcacaccgggaggacttggaccagtaggaccggttggcccagttggtccacagggagcacagggtccggcaggagcaccaggtgtgggtttgaacaatattactgcatatgatcctgcactgggaccaacttatgctcaaggccaagtagtaagctacgagggtagtctttatgttgccaatgtaaatggtcctttgggtacacccggaagttctccagactacactcttttgctgtcgggaggaacgactggagtaacgggagcaaccggagctggtttgacaggagccgtggcatttaatccagcgctcgccccgggttatccagcaggtcaagtcattacgtataacggtagtacttacattacgagtgtagctggtcctctaggaacaccaggatcttcatcggattacacattaatcgctgctgcgggggcgactggtgcaactggagccacaggtgcaggattaagtggcatcgtgccattcgatcccgcattagcaccaacatatccagctggacagatcgtcacgtttggtggcagtacttatattacaaatgtcgcttcgccaacgggtacgccaggaagttctccagattatacattgcttgcaggtgcaggacctacaggagccacaggtgcatcaggtgtaacgggagcaaccggggcgggattgacaggcctagtgccatttgatccagccgtagccccaacgtatccagcgggtcaggttgtaacgttcaacggtagtacgtatattgcaaatgtggcatcgccaaccggaacgccggggacttcaccggattacacattgcttgctggcgcgggagcaacgggtgtgacgggtgcaacgggcgttggagtaacgggaagtaccggagtcacaggggcatcaggagtaacgggagcgacaggcgtaggtttaagtggcattgtaccattcgatccagccgtagccccgacgtatccagcgagtcaggttgtaacgttcaacggcagtacgtatattgcaaatgtggcgtcaccaaccggaacgccggggacttcaccggattacacgttgcttgcgggcgcaggagcaacgggagttacaggagcaaccggcattggtggaacgggaagtaccggagctacaggagcatcgggcgtaacaggagcgacaggtcttacagggttgactggggcgacgggaattacaggagccacgggattaagcgtaacgggatcgacaggagtaactggagggaccggggcaactggtgaaacaggagcgactggtgtaggtttgagtggcattgtaccattcgatccagccgtagccccaacgtatccagcgggtcaagtagtaacgttcaacggcagtacgtatataactaatgtcgcatcgccaaccggaacgccgggcacatcgccggattacacgttgcttgctggcgcgggagcagcgggtgtgacaggtgcaactggagttggagtaacgggaagtaccggagtgacaggggcatcaggagtaacgggagcgacaggcgtaggtttaagtggtatcgtaccatttgatccagccgtagccccgacatatccagcgggtcaagttgtaacgtttaacggtagtacgtatattgcaaatgtggcatcgccaaccggaacgccggggacttcaccggattacacattgcttgcgggcgcgggagcaacgggtgtgacgggtgcaactggtgttggagtaacaggaagtaccggagcatccggcgaaacaggagcgacaggtgtaggtttaagtggtattgtgccattcgatccagctgtagccccgacatatccagcgggtcaggttgtaacgttcaatggcagtacgtatattgcaaatgtggcatcgccaacgggaacgccggggacttcaccagattacacgttgatcgctggagcaggagcgacaggtgtgaccggtgcaactggtgttggagtaacaggaagtaccggagcatccggcgtaacaggagcgactggtgttacagggttaacagggacaacgggaattacaggagccacgggactaagcgtaacgggatcaacaggagtaactggaggaaccggggcaactggtgaaacaggagcgacaggtcttacagggttaaccggggcgacgggaattacaggagccacgggactaagcgtaacaggatcaacaggagtaactggaggaaccggggcaactggtgaaacaggagcgactggtgttgcagggttgactggggcgacgggaattacaggagccacgggactaagcgtaacaggatcaacaggatcaacaggagtaactggaggaaccggggcaactggtgaaacaggagcaacaggcgtaacgggattgactggcgcaacgggagtaagcgtaacaggtgaaacaggagccacgggagtcggcgtaacgggaagcaccggagcaactggtgtcactggtgaaaccggagcgacaggtataaccggggcaaccggagtcggcataacgggaagcactgggtttactggtgtcactggtgaaaccggagcgacaggtataaccggggcaaccggagtcggcataacgggaagtactggagttactggtgcgactggtgaaaccggagcgacaggtgtaacgggagtgggcataacaggaagtactggagcaactggtgcgactgggggaacaggagcgacaggtgtaactggagccacgggagtgggcataacaggaagtaccggagcaactggtgcgactgggggaacaggagcgacaggtgtaactggagccacgggagtgggcataacaggaagtactggagtaactggtgcgactggaggaacaggagccacaggtataacaggagcaacgggagttggcgtaacgggaagtactggagtaactggtgtcactggtgaaaccggagccacaggtataacgggagccacaggagttggcataacgggaagtaccggagtaacaggcgcgactggtggaacaggagccacaggtataacgggagccacgggagtcggtgtaaccggaagtaccggaagtacaggagttactggagcaacaggtgcaaccggaacatctgtaacatctaattcggcttttgctgagaacactaatggtacgattgttgtaatattgggtggtacactcgttccattaccgaataaccaaaatattggcacaggtataaccgtcaatgggacaaatgacaccttcacactgaccaacgcaggtcgttactatatctcatacaaaataaatctgacagctgcacttgctatccaatctcgggttttacttaacggcgcagcaattccagcgagtgtagtatctccagtactttctctcagtcagctgcagtctgactttatggttaccgttaccgctggttctacaatacagttacaattattcgggcttgttggcgcagccgttctttctcctccggggtctacactaaacattattcagttaagttaatagttcgataacgtattaagactatttccattgaccaagagaagcggagttcatatggggttgatgggcaccccttttccaattccacaaatattttgtttgcaaacttcttcaccgatatttcagcgagtacatgaaaaaagacgggaaccactagggtcccgtctttccttttacatatagaaataagtttgattattccagaacaatttcaacagcagtattgatttcaggcagcgcagcaagctgcacaagcacatcttttggaacagctttatctacggtcagaatcatgatcgctgcaccaccaataattttacgtccaacctgcatggatgcgatgttgacatcgttttgtccaagcagcgttcctacacgtccgataatacctggtttatcgttgtgggagatcaaaatttgatgactttccggagcgatatctaccgggaatttgtccagacgaacaatacgttctccataacctgcaagcaatgtacctgctacacgacgttcctcagcatcctgagttgtaaccaatgttacggtaatcaggttagtaaatcctttagttgttgaggtttggcttacaaccacattcagatcacggattttggccagatgcatggagttaacgatgttggcttccccacccaaatgtctggcgagaatccctttcacaatgtaacgagtgagaggagaagtatctacttcagaaagttcaccagcatagtcgatccgaatctcctgcactgcattttgtgtaatctgtgctgcaaaactacccaacgtttcacccagtttgaaatacggttgcaatttgttcatcacggttggtgcaacagccggcatgttaactgcgttcttgaacggttcgttacgcaaaatgtgaagcacctgttccgacacatcgatagccacgttctcttgcgcttctactgtggacgcaccaaggtgaggcgtaacgataatgcttgggtgattcaggaacgggtgatcagcggctggcggctcgctttcgaatacgtcaaatgctgcaccagccacaataccttgatcaatggcttcgacaagtgccatctcgtcaactacaccaccacgagcacagttgatgatacgcatgccttttttcatcacttcgaattgtggacgtgaaatcatgtgccgtgtttccggtgttaatggtgtgtgaacggtcatgaagtccgcattgcgaatgatatcatctacactagccagcttcacttgcagcttctcggcacgctcctccgtgaggaacgggtcgtaagcaagaatgtccattccgaatgctttggcgcgcttggcaacttcactaccgatccgtcccatacccagtacaccgagcgttttatttcttaattccacacccaggaaggttttacgatcccacgtaccctgaattgtcttggcgtatgcctgaggaatgtgtcgtgccaatgccatcatcatggcaaacgtatgctcacaggttgtgatggtattgccatcaggtgcattaataacgatgataccgcgctgagtagcagcttccagatcaatgttatctacaccaacacctgcacgtccgatcaccttaaggttggtaccagccgtcataatacgatctgtaacacgagtctggctgcgaaccaagagggcatcatattcaccaataatggcaacaagttcatcttcactaagaccggttttcttctcaacaacaacatcatttgcatccaccagttgctggatccccagatcactgattgggtccgacactaacactttgtacatggtttcttcctccttaggtatgtgtatctatatcgtcaaggtctgacctcagcgaagaggtattccttaaaaccaggttgattcttccgcccaacaacgcggtgtcgcaacagagggggaaggtgaagcaaatagagtgatcccacagatatcctttaaaataaatcaaaaaactctcaatccacatactgcttgcgcaataagggacgagagttgtcgtggtaccaccctaattcaccgccgtttcgcaacgacagtcttagcggtcaatgaagaccgaagaggataacgggtctaaaccgattgcacctactccaatttcaatgcaataactcaggagcgctcaagaccatttgcctgccaccgattcacacctaccatcggctctctgtaagacgaagcaacgtcttttttccatcatcgtgtttaacgtgactaattttttcataatgtatcatggctgacatgagcatgtcaataggcttaaatgttttaaaatgttttgcagatgtctttagattcacacataaacagagtcaccataagtaatacaatagttaatatacctaccacaagaagatggaaagtaagctgtttggtgaactgaattttactgctttaatgaagtaatggcacggacatctaaccaggacttggggcaggccttgaacctaattggttttttggctatcatttagtatactatccgattggacaacgtaattgttatccatcaaatttaactcaagaggacagacgcatccgatgaaaaaattcaagtttcccaagttcaagattcagaaggctgagccacagcagcttaccgagcgtttgcttttaatcaatctatactttacacaaggtctgacactgattatcggagttgtatggatcttattgcagaaacgaaacttgttagatgtactcgcatggcctgacaattaccaatttatatggtggggtcttggtcttgcaggaataatgcttgttatggacttggtactgtcgtatgttatacctcaggaaagcatggatgacggtggaattaacgagatgctgttccgtgggcgtccgatctggcacattgtatgtatagcagccattgttgctgtgtgtgaggaattattattccgtggagccatccaacatgccatcggtccttactggacaagtattttatttgcagttatccatattcgttatttgcgccactggattccaacaggctgggtgtttgtctcaagttatggattaggttggatttacttgcagtccggcacattatgggcgcctatattatgtcactttataattgatttggtgtccggattagcgatacgttttcggaggggatcatgaatcagccattaagtagaatgaagacatatggcagtcagcgccatcgtcaatcggataaaaaagagaaatccgagcgtcaggtggcttctcaagtaagcatcgttgctgaaacggcagcagctgctgaggttggcggaatcacaccaattacttccgtttctttacctagatcacagcccaagccttatacagaaaaactggaaagtccagtacttcctcaaagggcaccatcacgctccaaaaaaacgccaaattcaacggaagaatcgatccccgaagcgggttcgcttcctacacggacagaattacatccttcacgtcggttaaaattgagcaagaggtttgtcaattcactcatttttatttttgtcatgttaacgattagtttggtttggtggggggttgaaggggcacccgctctgaatacgttccttcccttgccgtggtaatgcttttactcgcaggtttaatcattttgatgggagttttactactttttcatatgtggcgtgaagcccatattcatcaaatgattgaagaagaggttgaagtgcctcatctgccaatatcctttgacggggccatgattttgtatgtatccgacacgcacaagcgcaagctgaagcagaaggatctggcaaacgttaaaaacaaggtggactgggttctcatcggcggggatgttgcggaaaaaggaatctcatggtctttagttagacataacatgaaaattttatcgaacattgctccttcatttacggtgtatggcaaccatgacaagagggctggtaccgctcaacttgcgcgaatccttcgggaatcggacgttaggctcctgcaggataatgtagaatatctgcaaaggggcaacgacagattgagcctgatcggcatagactatcgttccaaacagggcgatgtattactacagcagatcggtaaccgtttttgcaaaattgctatcgttcatgatcctttgcaggcccttcgcttggaagaaaatgcagatcttattttaagcggtcatacacatggcggacaattggttttaccatttttcggacctgtgttcctgagcaaagcgtatcgtcccgtatcgaacgggtggtactccctgaagcgaagtccggaggacattcaccaagaaggcaaaatgcttgttagcagaggatacggtacaaatcatcttcctctccgactaagttgtcctgcggagatgcatatcatcacgttaagagtgcccgcggaaaaagcactcacagagaaacagccttgatccattggatcaaggctgttttattttaatgcgcaaaattacaatttaacgagcttccaattcaattgcacgcggatcaacaaaggaataacctttcttttcgagcttggtcagcaactcatccaatgcttcaaccgtccatggcaactcatgcatcaaaatattgcttccgggatttaactgatcgagtacattttggatgactttttccgggttgtctttggtgcttttatcccaatcgagagaaccattagaccaagtcatatataacatgccgtttttcttcacagcagccttcagtgcatcatttcccgaaccaaaaggtggacggaagaattgcggttcctcaccaatggtatccttcactattttttggacatctgtaacctgttttgccgcctcagcggtggacatttttttgagatcctcatgatcccaggcatgattgcctacaatctgaccccgatcatgtatgagtttgagtaattccggatgacttttcacccgatatccattgacgaaaaatatcgctttagcgttatgtttatctaaagtgtcgatcagtgaagtaatcattttttcttctttgggtccatcatcaaaagttaacaagaccactttgcttgggctcgcttcatcgtttggtttaatataataattttcattcatatgatacgtcttttccactttctcttctgtagaaaccttctccgaagattcaggttcttcttctgtcacagttgaatcttccgttgaagactcgggcacaccagttccgggttctcctgtttcagttgggttagagttaccttgctcttcttgaaccgtggtagttgattcgcccgctggtgtggaattatcagatgttttttcttccgctgtcccacaagctgacaacagcaaacttgcagcaatgatcaatgcagcggtatgtctaaacatgatttcaactcgctttcctgtaattatacggaatgagatcgctcactaccgcaaacactaaatatgattttaacacttgaaggaggttggtgtaatgaaggcttcatcctttttttggggcattgtcattggtgttgcagccagttcatggctgtccaaaggcaaattgcccatgatgtcatcgggttcatcaagaaatatgatggatcaggcaaaacataagatgatggaaatgactttcccgggtatggacgggttcacaagcaagcaaaatcaacatggtgaatcccacaaaaatccggcagcaaagaccgcaagagcaatcacaccgcaggaaaaagaagcgaatatgagcatgctcaaagattttattcgcaccaatcccgatgtgaagcatgaagttgagcaaattttaagccaaacaaacacaacagtaccgggtttataaaccaaaacctccaattagaatcatccacagtcttgatttgctgtggaatgattctttttttgtcgattttacttcgtgcatttagaggtataaaatgataacataactacatagatttattttcagcacatattgttttgtgcttcataatctgttataagacttgcttataaaggggagatcctgtatgaaaatagaacgactaagtcacgataagatacggattttcctgacctttgacgatctgagcgagcgcggaatacaaaaagaagatatgtggcaggaaatacctaaggttcatgaactgttcactgaaatgatggatcaggcctattccgaacttggatttgatgccacaggtccactcgctgtcgaagtattcgcacttcccgctcaagggatggttgtcattgtcacacgtggaaaatatgatccgcaacaatatggtttaggtcatgaagatgatcttcctgaagaagtatatgaaatggaagttacactcgagcaaagcgattccattgtttatgcattcaaggactttgaagtgctcattgaagctgcacatatgttgcgtcagcatgttacggatgctgggagactttattcctataaagacaagtggttcttgcatttggagccagatgaggtagattccaccaaacatgcggcattgattgccttgcttgctgaatttggcgaaggctcctcagttactccagcagtcatggaagagtatggtaaggttgttattcctgcacaagcgattgatgttatctgcacccacttcaaacgccaggattaatctctagttgtaatcgcgtctttagtcagaggagggaatttcggtgcttttgttttcggtcttagcggcagcagttgctccgggtctcgccttgttaacatacttttacctgaaagaccgttatgattatgagccacttcatatggtattgcgggttttcctcatggggattctgatggtactgcctgtgatgattattcagcgtggcatgatgatgtggctcggggataatccttatcttgaggccattatgatctcaggtggtgtggaggaattcgttaaatggttcgtactttatcatatcatctataatcacaccgaatttgatgagccgtatgacgggatcttatatgcagtcgctgtttcacttggatttgccactgttgagaatgtgttgtatgcctttgcggggaatgcatccgtctcagccatgttccttcgggcactgctccctgtttcagggcacgctatgtttgcggtaatcatgggttattatatgggtaaagccaagtttatcggtggtaagaaaaagcggtggtatctggttctttctctggtgttaccttttttctggcatgcattgtacgatgtcatcatgaacaccatggtgaatcattggttgtggtttatagcgccgctaatggcgggcctgtggtatggggcaatgggtaaaatcacacgagctaataaccgttctccttttcgttttgtgaagcgggaggaagaggttaaattataaaaatacggacacactggtggacataaagcgcatattgcgcctatgactccggtgtgtttttatttttacagataaactcccggggaatgaccgacagaaacggagatcgttgtgatgagaattaaaattaaaatcagatgcaaacaatgcggtgaacgatttacattacgaggcaagaaagatcggggccggattgagacgggattcaagcagtgcctatgtgataacagagaccagttcgaaattgaagaagagggcatggcaactgggattcagctgaattaaaaggaggacccaaacgctactttagcagactgcttgtgtaaggactggaaatcgcatgcataagagatctttcttcgatccacaatagaggtaggggtttagaagaaaggagactctaccgatgtataaacgattaagttcagttatgtttccgctatttgcagttctgctggtcggtgcgctcgtgtggggctatcaggagaatcaggagaagaatgcaattctgatcaaggcagagaatcaatatcagcgtgcatttcacgatttatcttttcatatggacaaattgcattcggagattgggaacaccttggcggttcactctacatcacaggggatgcatcgcaaaggtttgatgaatgtatggcgactcaccagtgaagcgcagaatgagatcaaccaactgccactcaccatgctgccatttaacgagacagaggagtttctctcgcgtatttccaactttgcctatcgggcgtcgatgcgtgacttgacgaacgaaccgctaagtgaaaaggaaatgggcaacctgaaaaagctgtatcagaattcatccgagattaccaagaatctgcaggatgtgcagcagaaagtgctgacggaccgattgcgctggatggatgcagagactgccatggcaacacaagagcaaaccatggacaacacgatcgttgatggttttcgtacagtgaacaaaaaggtacaggaatacccggagcttgattggggtccttccgtatccaatatctatgccaaacgatcagtcaagaaactgggcggcttgccggtgaccaaagaacagatccagagcaaggctgcaaaattctctgatgcggatcgtagcaaaatccaagtgcaggagaacggcaaaggaacagactgggagtcctacactgccacgattgatcatgccaacaatggcaaactgatgatggatttcacccgtaatggcggaatgctgatctcttacagtgatacgcgtccaatcggaaccaaaaaagtgtctcgtcagaatgccatggctaaagcagatcaatttctaatgaacaaaggctataaggatatgaaagctgtaaactatgatgaatatggtaatctgggtaaccttacttatgtgcgtaagcaaggggacaccttgatctatcccgagaaaatgtcagttcgtgtaggtttggatacaggcgaagtaaccggcttccaggcgagtgactttgtttacgaacataatgacatgcgcaaaattccgaaagcaactcttacggagcaacaggcgcggaaaaagcttaattcggagttcgaagaaaattatgttcgcaaatctctgattgagaatgattacagcaaagaagtattgtgttatgaattcggagggaaaattaacggttctcgttaccggatatacattaatgcgaatacaggaatagaagaagcggttgaagagatcaaaccggtcaatgcaacctcataaaaagatggataatttgaatttgaagttgagcgaataactgcggcagaccacgatgtggtctgttttttcttgttcaatgtgagaaaggtcatggtataatagtccttgtacatacgaagataaatacataaagtggcggtgaacagcttgtttccgaaaataaatgaaattttatacatccagattgcttctgcagatgaaaaagaggaacacaaagagtacaaatcacgcattgcagatatggatgacagcagttttctgattgaggtcccgatgcaacaaggaagcagccgtctgaaaaggctctttttcggagatgaattgtccatttcatatattacggaggatggggtccggcattattttaatacctatgtcacgggatttgaggaagatgttgtccgtcttgtccgtatccgcaaaccgcttccgagcgatatatccaaaatacaacggcgcagctttcttcgtgttcatgcaaatctcgaattggccatccagagtgaagacctgacccgtgccgtcggattgactgaagatattggtggcggtggattgtccatctacggcgaaacaggtttttcaatagctgaaggtcaaaaattgaaatgctggttgctggttccctaccggaattcaaccattgaacatgtgaattttgaagctgaagttgtgcggatcaaagccctggaaaccggcagacagctatgcatgctgaaatttgtgcagatttcagattcggagcgccagaaaattatcaagttttgttttgagcggcaacttgactatcgcacgaaataggaatgttgtggcataaaaagaagaaactgcgggtaccgtaatgaaaaaaacggaggtattgccttgaatcgtcgtcatgcaacccgcagatatgaacggctttattatgttttctccaggcgaatggaacgaaaggttacgattctgattacagtccttctaatcctgcttgtggtatatcaattgctgctgctggtaccaggcttcaaaaagaatttgaccaccattgaccgcctggaaggaacgccaattgaagtgcaaacgatgaatgattacaaacgtcgttgatttgtctgtttttgcatccatgtgtagagtgtggtataattttcacgatgcaggcaatgcctgtttttttattgaggtttatcgtttgaggaggaatgccccgttggcaagccagaacacatcagagaacgggaaaatgaacgttgcaattgacggacctgccggtgccgggaaaagcacggtggcccgattggttgcagaggcgctcgcgtatgtatacgtcgacacaggcgcaatgtaccgtgcggtaaccttgcatatgcttcggaaaggtattacaccggaagatgtgacacaggtacttcaggaagcccaaaagctggtcattgatttacaaccggatcccgacggacagaaagtgttctgtaatggggaagaagtaacctcggaaatccgctcccgtgaagtgacgggaatcgtgtcccgatatgcgcaaatcgaggggctgcgtacgcaattagtggatactcagcggcaaatggctttgcgcaagggcgtcgtcatggatggacgcgatatcggaacgacagtattgcccgatgcggaagtgaaaatcttcatgactgccagtgtggaagagcgtgcgcttcgccgcttcaaagaactggacccctctgaaggactgacgttgcaacagctggagcgagacattgccacccgtgacagattggatgagaatcgggaaatttccccattgcgttgtgctgaggatgctattgttcttgatacaacggagatgaacattcatgaagtggttgacaaaatcgtatcttattgcacaatggtcagaggagagatcggtctatgatttacacattttgcagcacattactgcggatcatttataccattcttttccgcttggaggccgttggacgggagaatattccgaaagaaggcggcgtacttttatgttccaatcatattagtaacttcgatcctccaaccgttggtatcaaacttcgccgtcaggtgcgtttcatggccaaaagcgaattgtttgaaattccggtactcggccgaattattaaagccgtgggcgctttccccgttaaacgtggaggtgtcagcaaggaatccatcaaaacctcactcaatattttgcgtgatggtcaagtgcttggaatcttcccctcgggaagccgtcacaatgatggaggtatcggcaaaaaaggggcagcgagttttgctctccgcagtggcgctacagttattcctactgctattatcggtaactacaaagtttttcgtaagatgaaagttgtatatggagcaccagtaagtttggacgagttcaaggaagacccatctggagaagctctggagaaggcgactgaaaagattatgtccaagattaacgagatggtgcaaacgggcgtgccaagcaagtaatggcttcgtcggtagctgagtgcatgtttccatatttttgagggagactaaagtttgagcactcagtgatgaaagtgttttgaactctgctacaggcaggtttgaatataatggggtttttgaattgaggagggtatttgacatgtcggaagaaatgaaaaatcaagaagcaacccaagatgagttggatcaattcgtttccttgaaaaaaggagataccgtaaaaggaaccatcgtcaaattggaagataaccaagcctatgtgagcattggatataaatatgacggtgtcattccaattcgtgaactgtcttcattacatgttgacagcgcgtctgacgcagtagaagttggacaagaagttgaagctaaagttcttagcatcgacgacgagaaagaaaaactcgttctgtccaaacgtgcaatcgacagcgaaaacgcatgggatcaattgcaaaagcattttgaagaccaagacgtattcgaagttgttgtaggtgatgttgttaaaggcggtctggtagcagacgtgggcgtacgtggatttatcccggcttccatggttgaacgccatttcgttgaagacttcagcgactacaaaggacgcacactgcgtgttaaagtgaaagagatcgaccgtgagaacaacaaagtgatcctttcccaaaaagacgtactggagcaagaattcgaagcaaacaaagctacagtaatggctggtttgcaagaaggtcaagtgatcgaaggtacagtacaacgtttgactcaattcggtgcatttgttgatgtgggcggagttgacggtttggttcacgtatccgagctggcttggacacacgttgaaaaaccatccgacgtactgtctgaaggtgataaagttagtgtgaaagtgctgaaagttgaccctgaaaaaggcaaaatcagcctgagcatgaaagctgttcaaccaggtccttgggaaacagcaagcgaaaaattcaattccagcgatatcgtaacaggtgttgtaaaacgtctggtagacttcggtgcatttgttgaaatcgctcctggtgttgagggacttgtgcatatctcgcaaatctcccacaaacacatcggcactcctcatgaagtgctgaaagaaggacaagaagttcaagttaaaatcttggacatgaacccttctgagcaacgtgtaagcttgagcatcaaagaaacagaagaagctccagctcaaccacaaaaatcagaaagaccttcaagaaacaacgctccgcgtgaagaaatcaacaatccaaacgtttccttgaacaatcaaggtatgagcactacgcttggcgaactgtttggagacaaactcagcaaattcaaataagttaacaatgcatggttctaagttatatactgcatattttgctgaataacaaaagcaagatcggcgagcccaaggcgggttcgccgattgtttttattgcgagtaatttggcatgaaacgttagccaagatatatcttttttgctatgatgagtatcgtaagtatggacaggaggagtggaatgtatggcaagacccgttgtggcaattgtcggacgaccgaacgtgggtaaatccaccattttcaatcggatcatcggcgacagactggccattgtggaagacaagccgggcattacccgtgaccgtatatatggaatcggtgaatggaacggtaaaccatttagtatcattgatacaggtggtatcgaaattgatggtgaagatgtaatcttaaaatcgattcggatgcaagcagagctcgctattgaagaagcggatgttattgtattcatgtgtgatgcaaaagcaggtattacgcaatcggatgaagaggtagcagagatgctctaccgctcaggcaagcctattgttgtagccgttaacaaagtggataatatcggacgaagtgagctcatttatgagttttatggatttggtttcggtgatcctattggcgtatccggaagtcacggtacaggtgtaggtgatttgcttgatgcaatagtggagaagttgccagaacttgaggaagagacttacgatgaagatgtcattcgtgtagctctgatcggacgtcctaatgtgggtaaatcttcactggtgaacgctattctgggtgaagagcgtgtcattgtaagtgacgttgctggaacgacccgggatgcgattgatacaccttttgaaaaagacggccaacgttacgtgctgattgatacagcaggtatgcgtaagcgtggtaaagtatatgaaacaactgagaaatacagtgtaatgcgtgcgatgcgtgcgattgagcgtgcagatgttgttctgattgtcattaatggtgaagaaggcattattgaacaggacaagcatattgcaggatatgcattcgaagctggtaaagcgtcattgtttgttgtgaacaaatgggacgtggtagagaagcatgacaaaacgatgaaagagtttgagagaaaaattcgggatcacttcctgtttatgacttatgctccagtcgtattcttgtcagccctcacaaaacaacgcttacaaaaattgttaccggttgtgaaaagggtagcagatcaacactcgttacgtgtacaaacacatctacttaacgatgtggtgtctgatgcggttgcaattaaccctccgccaacggataaaggacggagaatgagaattaactatgtgactcaggttgccgttaagccaccgaccatggttgtttttgtgaacgatccggaattgatgcacttctcatatgagcgctacctggagaataaaatccgtgcagcgtttgacttcgagggaacaccaattcgcatatttactcggaagaagtccgacgaaagttaggggagaagtgtgtgattttacaaatcgcagcgattgtactgagttatctgctcggttcgatcagctttagtgtcctccttgccaaagcgatacgggggatcgatattcgtcagcacggaagtggaaacgcgggagctaccaatacattgcgtattttgggtaaaggaccggcaattgctgttctgttacttgatgtacttaagggtgttgcagctgtatggattggaatctggctgagcgacggttctgcctggattcctgcactcagtggtatagcagccattgcaggacataactggccgctttacttccattttcgtggaggaaaaggcgttgccacagccattggtgttctggtgagtcttgctttcctgcctgcgttatgtgctggggtgatcgccattctgtctattgtattgacacgctatgtttcattggggtctctgatttttgtagcatttacacccatctttatcatggtattacccggatattcaatgaatatcttctgggggagtctgattatttgtctgtttgcgttctggagacatcgtaccaatattgcgaagctcgccaaaggacaggaaaataaattgggatcgaaaaaccctggagggggtaaacgagttgtctaaaaaagttgctgttctagtcgctgggagctggggaacagctctggccagtgtactcgccgccaatcagttggatgtgatgatgtggacacgtggtgaagaccaggctaacgaaatcaataacaagcacactaatactcgctatcttccggatgcggagctttcaccccggattcaagcaacaactgatatggaagctgcggtggaaggcgctatagctgtgttaattgtcgcgccttcatcagccatgcgtgcagttacgaaccagcttaaggcttattacaagcctgagatgttagtcattcatgcaaccaaaggttttgagacagaaagcctcaaacgaatgtccacagtcatttcagaagagcttgaatgtgaagaaggacgtgtggttgttctttctggcccaagccatgcggaagaagtggtgaagcgttgtccaacgacagtggttgtagcttcactggataaggcatctgccgagtctgcccaagctttgtttatgaatgcttatttccgggtttacacgaatcgggatatgatcggtgttgagctggcgggtgcattcaaaaatatcattgctcttggtgcaggtatgtccgatggtcttcaatttggtgataatgccaaagccgctttgctaacacgcggtctggcagagatcacacgtattggtgttgagatgggagcaaatccgctaacgttttcgggacttgctggaatcggggacctggttgtaacggctacaagtcagcacagtcggaactggagagcaggttccatgttaggccagggacagaagctggatgatgttctgaagtccatgggcatggtggtagaaggcattcgaactacgcaagctgcctatttcatctcacaaaaatacggtgtacaaatgccaattgcggatcagttatatcacgttttattccaggagagacagccgcgtgatgcggttgaagccttgatgggacgtgacccgaagactgaaatggaagtcatgaagcttgaaacctgggagcagtggcattcctgattgtaatcagcctaaacgtaccttgtgaaataagaagcttattcaccttttctgtagcagactcatactatacacatgagtattgccggaggaggggagacgaatgggtaacaacatttccaaagatgcactgaatgcaatcaataagaaaacgggtaaaacgataacggaaggtgccgttaagaaattggcaagcacggtgaaaccaacgacgattcagaatgaagctcagttgcgccaattgatcaaacaagtatccgccatggcgaaagttccggtatctgaggatacggttaaggatattgtgagtgcggtcaagaaaagcggattgaatccgagcagtatggaatcgttaatgaaaatgatgatgaaaaaataatagatcacacctgcttgtgcaggtgatccagtaagacaaaaagacgagtcggcttctgccggcttgtttttttgtcttttttttggaaagttgagctgaatttcgtgttataatggttgcaattgtcacagtgtcagtgatgaataacggactgaaggggagactgctggattatgagcgcaatggacaagatgtggctgtcattggtggccatcctcattatgggactatctgtattcttgattacgtttgctcgtgccaaaacaaaaggtattgtacgggggattctttctctgattgcatttttgattatgctgattggctttttcggtggaatcgcttctctgacctgatttcccatgcctgaaagataacatccgcataagcacatcataagaactgacacaatgaacacggatgaggggagtgtgagcctatgaggccgcatgatacggaggggcggacagagcgttatccggaattacacgcggctttgctggaaacggccaaagcctggaacacacagccgcagacatggttacttggagggagttgtgggttgctgcttcaaggggtggagttgcaacaggctccgagagatattgatatctatgcggatgttgctgctgctaaggaacttcaccgtagcgctccgggggaaatgcttgacgagcctacagtggacaagacaggaccgtatgcttctctgctgagccactatcaggtgggtgaatgtgcgctggaactggttggtggtttcgaaatatgggctcgcaaaagttggtaccgtattgagattgaacatgtacttgctccgcatgcaccagtagcacaagtgggttcatatagcctgcgactgatgccgcttgcgcatgagctgttgtttaatctgctgcgaggtcgtgaagatcgttatgtccccattgcgacacagatgcgcgagcagccagatgcacatcaacctataatgatgcttttaagtcaacagaatgtatggacaaaccgcttcagagccgaagtggaaaagcttgttggctttacatggccccagtaggttgagggaggaaaatgatggactataaagttacttttttacctatgaacaaatcgatagcactcaaaccaggggcaacacttctgcatgcagcacgacgtgctggagtcaagattacgactcgatgtgatggtaaagcggcttgcctgatgtgcaaagtgaatgtggatgaagaatatcgggcggaactgtatccaccaacagatgcagaaaagcgcaagctgggttcactgttggaagcaggtacacgactgtcctgtcaggccaaggtgtgtggatctctatcggttcatgttccagaggacccgctgaaggcagctattcggaaacaactggaacgtcaacaacaggaagacgactggttctgagcgttatgacattgattctctaatgagttattcaaggaggacacgaatgattaggaacaagccaaaatgtgtggaaggaagcggacggcagcgtctgaaacatcagacgggcggtctgctgttattcctgttgtttgcttttacagcaactggttgtatgtatccatcccagagtaattcggaccctaagatagcctatcgggaaagcgtgagccgcatccagagtgcggtcgaggcatttcagcaagatgaggggattttgccaatcatcaatgcagatatggaaacgccaaaatatgaaaagttcagagtggacctgctcaagttgaaacaactggggtatctggatgaaataccggggactgcttttgaaagtggtgggagcgcttacttccttattcaggacgaagaagtgaatccgaccattaaagtgatggatcttctgaccgtacagaaagtaaacgatgtgcaacgaatggttaatcaatataagtccgtacataacaataagctgccaagcggggaagaactgtatccggggttatatgttgtgaatatggagcaggctgctcaggcaggtactccttccattacgctgaatagtgtatattcaggtcaggcgttaccgtttatgatggatgacgaaggcaaggtctatgtagattatgcttttgatattatgcaggcagtggaaaagtctgacgtgtctccagcagagactgaagatgttcgggatttgctggtggaacactcctacttcgtacctgtaaaatcggttttctacgcttggaaaaataatgcgccggttgcccagcccataaaataagcatggttgcaattcaaatgatttagctgtatgaccaccatggctctaatggttcaaaaagagatattccaaataagggatatctcttttttcttttgtcagtatgagcaataaccgtcataaaagcttcgcggatcacataaagtagattgaaataaagacgcgcagtccgagatcgggggattctcctaatgtcatcaccttaagataaaaaaacaaaaatacgcgtcatattgccgcatacggatacataagatgatactagtccaattgcatgtacgagttaacgccgctctcgccggtttcatcagaatgcaacgttcggcggcggacgacttccgggcactcacaaaggcggctctaccgttgcagggatttcagtcttctgattgaaaaaacgaagcggatgctctttagcatttttccttcggagtaatttagggaggggatttcattggagaaagtggacatttttaaggacatagctgagcggaccggaggggatatttatctcggggttgtcggcgcagtccggacgggaaaatcaacatttattaaacgattcatggaaaccattgtgttgccaaacatcactaacgaggctgaccgtggtcgagcggtggatgaacttccacagagtgcagcaggtaaaaccatcatgactaccgaaccaaaatttgtaccaaataacgcagtccagatcaaggtggcagaaggacttgatgtcaatgtgcgccttgtggattgtgtaggttacgcggtggaaggagccaagggatacgaggatgagaatggtccacgcatgatctccacgccttggttcgaggaaccaattccgttccaggaagccgccgagattggtactcgcaaagtcattcaggagcattccacactgggtgttgtggtaacaacagacggcacaatcgccgaaattgcccgcagttcctatgtggaatccgaagaacgggtcattgcggaattaaaagaagtgggtaaaccgtttgtcctggtcatcaactctactcgtcctcgcagtgaagaagccctgcaattgcgcagtgagcttgctgccaaatacgacattccggtgatgacactcagtgcagcgaccatgacggaagatgatgtgacgggtgtacttcgtgaagtgctctatgagttccctgtgcatgaagtgaatgttaacttgccgagctgggttatggtactcaatgagactcactggctgcgtagcaactacgaaaattccgtacgggataccgttaaggatattcgcagacttcgtgacgtggatcgggttgtcgcacagttcatggaatatgaattcattgatcgcgcaggcctgagtggcatgaatatggggcagggtgtagccgaaattgacctgtacgcgccggatgaactgtatgatcagattctcgtggaagtggttggcatcgagattcgcggtaaggatcatctgctgcaattgatgcaggaattctcgcatgcgaagagagaatacgaccgcttcgcagaagcgctggagatggtcaaaacgaccggatatggcattgctgctccatctctcgccgagatggctctggatgaacctgagctcattcgtcagggcaccaaatttggcgtacgtctgaaagcaacggcaccgtccattcacatgatccgggttgatgtggaatcggagttcgctccaatcatcggtacggagaaacaaagtgaggaactggtgagatacctgatgcaggacttcgagaacgacccgatcaaggtatgggattcagacatgtttggtcgttcgctgcactccatcgtgcgagaagggatccagggcaagattgccatgatgccggataatgcaagatacaaattgcaagagacgctgggaagaatcattaacgaaggttcgggcggcttgatcgctatcattctgtaagacatcaaaagaccgtaagggggcatcccctcgcggtcttttttacgtgatttctttattttggatgaaatggataggaagaatagtactttcgaaaaaacttagcgagttttagctttaaattgctaaaacccatttacatactagggattagccgttatattaatattcaactattgtgatcgagatcacagagattggacagggggatacagagatgaaaagaagagagacaaaatggctgtggttgagtgtgttattagtatttacattggcgctgtccgcttgcggaatcaaaaaagaaccggcagccactccggcttcgggtgcatcagatgatacaccaaaaacggaagcagttacaggccctctaagcggcaaacggattgcacttattatggagtttaatacaggtactttctcgcagcaatatgtacaaggtgtaaaagaagaaatcgaaaaattcggtggagaactgacaacgtttgttgccgataatgacaaagcaaagatggtatccttgcttgatagcgctattaaccagaagttcgatgccattctcacggatcacggtgattccctattagagccaggcgtgaagaaggcagtagaacagaatattccagtggtcgtgtttgacgcagctatcagtgttccaggagctacagtcctgtcgcaggatgaccagaagatggctgaactgacactggagcaaatgaaaaaagatatcaatggacaaggcaatattgtaaaagtatgggtagctggtttcgcaccgatggaacgccgtcagattgcatacggtgaattcatgaaagcaaatccggacatcaaggaaatagcaacattcggttctgcacagaaccctgcgctggatactcaagccaaaatggaagctattctcaagcaatatccaaaaggtgagattacagctgtatggactgcatgggatgagttcgccaaaggcgcagcgcgtgcgattcaacaagctggacgtgatgagatcaaagtgtatggtatcgatatgagtgacgaggacctgcaaatgattcaggacccgaaaaatccttgggttgcttctgcggctgtggacccaacggatattggtcgcgtccaggtacgttatgcttatcagaaactgaacggggacgagacggaagatgcagttgtccttaacccggtctatgttcaacgtgaagctctgccagataaacaaatctccacttcggagctgtcagagttcgttgaaggttggggtggtagcacacaaggaatcaaggactggatgagtgaatacggaattactgctaaataagcagcgtatgggaagcgcgccgcaaggcgcgctttttctaccataatgaagatgagcgagtctggatgagaaatgggatactcccgtatgggaacgattggaggttaacatcatgagcactgcaccgatactgcttcaaatggaacatatccacaagcagttttcaggtattcctgcactgaaggatgtggatttctctgtaaaaggtggggagattcatgcgctgctgggtgccaatggtgccggtaaaagcacgttaatgaaaattttgtctggtgcctatccattggatcaggggacgattcaattgagtggacaagcgcttcatttaagttctccgggagacgcaaaggcaagtgggattcactgtgtctatcaggaagtggatgcggcactggtgccacagctgacggctgcggagaacatcatgctggatcagttggcttcatctgctggaggttggtggaaaagtccacggaagctgcaacagcgtgcggttgaggcattgaagcaattaggggcggacatatctgttcaccaaaaagtggccgatctgacacttgcagaaaaacagatgatactgctggcacggattttgatccaggatgccaaagtcatcatttttgatgaaccgactgcaccgctgagccaggaagaaacggatgcatttttccggattgttcatctcctgaaggatcggggcgttgcctgtattttcattacccatcgtcttgctgaagtgacggatcactgtgatcgcgttacggtcatgagagatggacaacatgtatttaccggtgatgcaaagggactgacgatcaatgatttggttacacagatgctgggcaaaccattcgaagaagagtttccgaagacggaagcacccgtgggggagctgttattggaggcacgtgggcttcgtcgtggagtgaaggtaaaaggtgttaacctctctgtacgacgaggtgaagtcctcgctgtggtgggtctggtaggcgcgggtaaaacggaaagctctcgtttgctgattggtgcagatcggctggagggaggcgagatccggcttaacaaccgcaacctccgcctgtctcagcctgcggatgcggcggctctggggattgtttctgtaccggaggagcgacgtaaacaaggaatcctgattcaggagaacgtggaacggaatttaagtctacctttgctaagccgtcttagtacattaggtttcgtaagccgcaagcgggaacgtctgaacgcagagtcattggtgaaacagcttagaattaaaacatcgtccgtgaaacaggaagtgaaatatctaagcggtggtaaccagcagaaggtagccattggtaaatggcttaatgcggatgcagatgtatttatatttgatgagccaaccaaaggcgtagatattggcgcaaaaagtgacattttccgcatcattaatgaactggctttggcgggcaagggtataatctatttcacctgtgaactggatgaaggcatgggaattggtgaccgaatcgctgtcatgtgcgaaggtgttatcgtaaaagagttcaaacgaggcgagactaaccaagaacagctgctatactatgcaagcggtggacaagaggtgcaatcatgaaggataaatcactggattttgcgttccgttacggggcgattatagtcatcataggtgttatcgcatttttcggcattaaattgccttatttctttacgtacagtaacttgaccgatattttgggctcgatctctatcgttacttttgtagcgatcggtgttacgttatctctcattgttgatggatttgatctctcggttggtgcgactgtctcattaactaccgtcgttactgcttcgttaatgatttggtatcaacaaccactagcaattgtaattattgtgccactaatcattggcgctgttattggtttacttaacgctttgctcattgtaaaattgcgtattccggatttactcgcaacccttgccacgatgtatatcatcggaggtattcacaaaacgtatgcacagggatataccatttacaatcacatgcagttccctgacgggagcaaagctgcgggagagatggacccgacatttctacttataggacagggtaaatggcttggtatgccgatatcggttatcatgttacttattgcggtaataggtgtgcatatctttttgacgtatacgaaatatgggcgtcagatgtacattacaggtggtaatgaggaagctgcacggttgtctggaatcaaggtgaaaaaggtgcgtacactcgcctatgtagccgctggagtgtttgcagcaatcggtggtatcatctatgcctccaaagtaggatctgggcaaatcgatgctggatcaccgttgttaatggaatccgtagctgcagtatttgtcggtttctctgtgtttggtgcgggtaaacccaatgtcatcggaaccttcattggttcggttctgattggtgtacttgtgaacggtttaacgatgatgaacgtacagtatttcacacatgatattgtaaaaggtggagttctcgtgcttgccctggcggttacattttacgtcttaaaccgcaaccggacttgaaattgtgggctgtctgtattagtatgaaatttgttcggcgtctgaaatgcccgtggtttcagacgatattctgccgaaaatgactgttgaccgcaggcggagatttgtgttcagcgctcaagatgtacgtagattttttgcgtatgaacgtatatttcgctataaaacggaaacacagtataacattcaggacattgatacaggaggtgaaaaacaaatgaacaaatcagacttgattacacacgtatctgaagcgactgaattgtccaagaaagatgtaacgaaagcggttgatgccgtattcgaagcaatctctgaggctcttcaaagcggagataaagtacaattggttggttttgggaacttcgaagttcgcgagcgctctgcacgtaaaggacgcaacccgcaaacaggtgaagaaatcgaaattcctgcgagcaaaattcctgcattcaaaccaggtaaagcgctcaaagacggaattaaataagatttctacatattccatatgtcgacaaaaagaccgtgacttgttcacggccttttcttttgccctttaacgatgattcttgcggttcattcgtataaggcgcaggttgacaaatgaaacaatcttaatcatcattaacgctatcgaactaaagaaggggacatgcgtgatggatcatccaaccggcaatgattatattgtaattaaggcagaggaaaatggtgtccaggtgatcggattaacccgaggtcaggatacacgttttcaccacaccgagaaattggacaagggtgaagtgatgtttgcccaatttaccacccatacttcagctattaaaatccggggcaaagccacgctgattaccaagcatggacagattgaatcggagtaatggacagattgaatacattcaaatgaagattgcaggcatagcctgctttttttcattgtacaatgaggtatgagcctttaccggacagactacactaacaggtaaaggcagggaggcgtatatgaaaccgcggatgattgttactgcttcaatgctggcaacggttgcggcggtctttctgcttgttgcgatacaaaccttacatatgcgtacatggggcggggacaacgtacagcctgcctctgcatcacatcatccagttcagctaacgaatgacaatctggttgatgtgctaagctctatgcaactatcaactcccattgcaagagtggaatggaaacagtccattttgagactggacctcaaagttcaaggaacgggtacaagttacactgaaatctatgagaacatggcagctgtagcggatctgggctttcggagtctggataacgtggatcaggtgctgctgcgtgtgatggcagaagatgaatggatgcataaacgacatctgttacttgctgctgatattcggcgtggagagtggcctctgtatgcaattgaaacattacggaactggaaaagtgcggccttttcagatgaattgaaggactggtttcatttgatggagaccgaactctggaagaagcaattcgaaatgacaagtcaggggtaatagaatagcaggattcagtgcgtgcccgttcaacatatgctataatatataagattgtagtgcagaaatggtttaacaatgttaaggctcggaggctgagaatgaattcatatcgcgtaccccaactagcaaagaaatatacggattacgacatgattcgacaacatacggaaatcccatcatttccggatagccgggcacgtctgttgcaggtatttgtgggccgcacagacgaaaaggtgcatcaagagttatatgctcttgcaacttcgctcgttcagttggccatggatacgcatgatcgaatcgataccatttccggtgagcggagagagcaggagatgcgttcacgtcagttgaatgtactcgccggggattatttaagtagccgtttttatcaattgcttgcccaagcgggcagaattgaaatgattggcaaactcagtggtgctgtatctggagtgaacgcacgcaagatgacgctgtatgaacggatgaagaagcttctcgtttcggctgatgaatacttgcgtgaaacggtacagctgaggatgcagctgtttctttcatttacaggcatgattcaacataacgaagagtctttgtggaacagcctgttgaccgaattcagctcctgcgaaacgatcgtggaagaactgaagcggatgaatgaccaacaacaatatcttcacagctatgcatactggcacatatacgagcatggtaatgacgatgagcgcaatgtgttgcgtcagtctgaaccggatgcacgtgcatggaacactatggtgctgaagcatagggttggcgaggttttgctggacaagcttcgcgagtgtacacaccgcattcaactgttgttgcaagacgaggaagggcggatgggcttgcaggagatacatgcaattctagagccttacttggcatatttgcagccttcacatgcggcagtaagggaagattgagggggagacagacgaatggggagcggagagaccaaaccgaaagaagaatatgtccattcggtttttcagagtatagccggaaaatatgatgtcatgaatgatatcctaagtttccggaggcataaggcttggcgtaaattcaccatgaaaaagatgaatatgtccaaaggcgataccggtcttgatttgtgctgcggcacatgtgactggacgcttgctatggcagaggcaagtgaaacggggcacatgcacggacttgatttcagtagcaacatgctggaggtcggccagacaaagatcaatgcggtgcaacgtcaaaaacagattaccctgacacagggaaatgccatgtcacttccttttgaagacaattcgtttgattatgtgacgatcgggtttgggttgcgcaatgtacctgatctcagacaagtgttgtctgaaatgaaacgtgtggtcaaaccgggtggtatggttgtgtgcctggaattgtccaagccaacatggcagccgtttaaaggcatttattatttttattttgagaaggttttaccgaatcttgccaaagtgtttgctaaaagttttgagcagtacaaatggctgccggactcactggccattttcccgggaaggcaggaactggcagacatttttgcagaaactggattacaacaagtgcaggcctaccctctgaccggaggtatcgcggcactgcatattggaaccaaggagaatcagcatgtttaggaaaattcgcatctttttagaaatgatcaagattgaacacacgctttttgctttaccttttgcatttatgggggcgatcctcggctccatggtagtgaatgataccttcccaagctggatgcagatcatgtgggtattgcttgcgatgatcggtgcacgtagtgcggcttttggtttgaaccgaattattgaccaagcgattgatggcaaaaacccgcgtaccgcgatgagagccatcccggcaggactgttgaaaaatggggaagttgttatatttgtcattatctcatttatattgttattctgggcctcatccaatcttaatgtattatcgatgcagctgttgcctattgctgtgtttatgttggtactgtattcgtacaccaaacgattcacatggttatgccacattgttctcggaatgacgattggtttggcaccacttggtggctgggtagctgtaacaggaacgatggattggacagcggttgtgctgtacgttacgattgtgttctggacagcgggctttgatattatctatgcatgtcaggatctggaattcgatcagggagagggtcttcactccataccttcccgttttggcctggttaaatccttgcagatcgctaagttcttccatgtgattactgcaattggttttcttgcgttattgctgatgacagatctgagctggtggtatggcgcaggcatgttggtgacgtatggaattctgttctatcaacactatattgtatcgcctaatgatatgagtcgtgttcaaacggcgttttttaccatgaacagtttgcttagtttaattgtatttacgttcactctgattgatctggcggtgaaataaatggtgcagcagccggacaataaacgactggttgtcggaattaccggagcgagtggcagtatatatggcattcgattaattgaaacgctgcttgatttggaatataacgttcatctggtcatatccaatgcagggtggcgtgtactgaaagaagaattggactgggatgtgacgaatcgggacgcggtgctggaagaaaaattcggcaaccgtgccggttctctgatctatcatcctgtgagtgatataggggcctcaattgcaagtggttcttatctggccgacggcatgattattatgccatgttcgatgggaactctttcgtccatcgcgcagggatcgtcggataatctgatgtctcgcgcagccgatgttatgatgaaagagggaagaacattgatcctcgtaccacgtgagacgcctcttcatgcaatccatctggagaacatgctgaagctttctcgtcttggtgtacgaatgataccggctatgcctgctttttattacaaacctcagactatggatgagttgattctgtttttagtgggtaaagtgctggatagcttgcgcatcccacatcaactgtttacaagatggggagaaccggatgaacggggataacgactgagttcgatacaaggctgttttttgccaaagtgttgctcggtttatttgtcccccgaatcccggggtattggtgagcactgatggtgagtcttcatgaaccacagtcttgacccatgctccggcaacttctgtattttgtttcagaacaagtcgcagagtttaattttcgggtgtcggctatgacattcggagaagaaaaacacgttagattaccttatagaacaacacaagcaagaacggtaagccgggtttttcgtaatgcctgcaggcccgacttgctggaggggaaggtaagcatgaatttatggactgacaatacgctgatacgggtgaacgaatgaaactattggatattttcgggttgttaaaaaaggacatggattacattgagaaagagttgtatcgcagtgttcgaggagaacagaagctgttgagtgaaacgtcacttcatttgctcaaagcaggaggaaaacggttgcggcccgtttttgtgttacttggtgggaaatttggtacatacgacattgaacgtctgaagctggttgcggttccgctggaactcatccattcggcatccctcgttcacgatgatgtcattgataatgcggagacacgccgaggcaaacccacggtgaagtcaaaatgggataaccggattgccatgtacactggagactatatctacggtaaggcacttgaaatgactgccggattatccgatccagcgattcatcgtatccttgccaaagctatggtacagatgtccattggtgagatggagcaaattcgcgactttttcaatacgggacaaagtgttcgtaactatctgctgcggattcgccgcaaaacagcacttctgattgcggttagctgtcagttaggggcattggctacacgtgcgcctgagcatgtatcttccctgttgtatacatacggatacaatgtggggatggctttccagattcaagatgatgtacttgatctggtaggtactgagaaacaacttggcaagccacctggcagtgacatgaagcaagggaatatcactcttcctgtactttatgccttggaagaatccgatctgcgggaacctttgcttaaggagatttcccgtgtccagcatgaagaaggacgggcaagtgcatcggatgcaattggaatgattcgacaaagtcaaggaattgctaaagctgaagcccttgctgaccgatatatgaagaaagcgctcgatgctctggatcagctacctaacatcaagacgaccaaaaacctgcgtgatatcgctcattttgtggttaaacgtacacattaaacaatgtatgaccttcgactctcagattactcatacccaaagatgaacagaactgtgagattcctcattgggaggatttggacatgtatgttacaatcagagggattgcgtttacatagtgattaactttgaaccgtgagtgaggagtgagctgatggatcgtacatttttgatggtgaagccggatggtgtgcagcgtggattgatcggtcgaattattagccgtctggaagacaaaggatttaagttggtggcaggcaaattggtgcagatgtctgaggatcaggcaaaacgccattatgctgaacatgagggtaaaccatttttcgatgatctggttcgttttatcacatctgggcctgtatttgccatggtgtgggaaggggacgatattgtggcgcttgcgcgcatcgtcattggaaaaaccaatgtgaaggaagcagctccaggtaccattcgcggagacttcgccagccacacaccacataatctgattcatggggcagattcgccggaaagtgcttcccgtgaagcagcaaatttctttgcttcagatgaactggtggtatacgacaagagcatcgcagcctggttgtaattattagccaaaagggtgatacacgatgctggagcaagaacaactactagacccggattacaccggattcattcgtaaaatcaaagagagcacaggcattgatcttgctcaatacaaggaaggccagatgaaaagaaggctgaccacacttcgcaacaaaaacgggtttcatacattttctaacttttttgaagctatgcagaaagataaaacattgttctacgagttccttgatcgtatgacgattaacgtgtcggaattctggcgtaatcccaatcgttgggaagtgctgcgggacgagatcctgcctgagctgctggggtccaagcgtcgtgctaaagtttggagtgcggcctgttcaacaggtgaagaaccttatacacttgccatgattctggacacgatgggcattttgaaggatagctccattacggcaagtgatctggatgaaggtgcattggccaaagccaaggaagggcgttatatggaacgctcacttaaggatgtgccaaaggaaacggcgaaccgttacttcaagcaggatggcttggtataccgtattgatgagcaactcaaaaattcgatcaagttcatgaaacaaaatttgctggtggaccgttttgacgatgggtacgatctgattgtgtgccgaaatgtcatgatctattttaccgaggaagccaaaaacctgttgtatcacaaatttgcagcaagtttgcgtccaggcggtattttgtttgtgggtagtacggagcagatcttctccccgggacaatatggtctggagacagcagagacattcttctatcggaaaaaataatgataatggttgttcagccgtctgaagcacatgtacatgtgttcaggcggttatttgtataccaagtacaagaaagcgccgactttcttgtcaaagccggtcagctatactataataagcaaagaaattatgggattttagcaatgtgaagtttaacagtttaaagggggaacgtattatgagtttacgctatttaaccgcaggggagacgcacggaccccaattgaccgctattattgaaggattgccaagtaatttgacgattgattttgaagaactgaatttccagcttcaccgccgccaaaagggatatggccgtggacgccggatgcagatcgagaaggatcaggcgaatttcgttggtggtatccgtcacggatatacaacaggtgctccggtagcgctggttgttcaaaataacgactggaaacattggcagaatattatgaatattgagccgattgaaggcagtgacgaagagaaacgtcgcgttcatcgtccacgtcccggacacgctgatctgaacggtggactcaagtataatcttaaagacttgcgtaacgtactggagcgctccagtgcacgtgagacaacggtacgtgtggcatgtggtgccattgcacgtcaattcctggctgaattcggaatcaaggtagctggacgtgtacttcgcattggagagatcgaagctccgtatcaggaccttccgattgatgaactgatcgcagtgacagaagcttcctctgtgcgtgttacggatgctgagacagagaagaagatggaagcctacatcgaccagattaaacaagaaggcgattccatcggaggaatcgtggaatgtatcgttgaaggtgtacctattggtcttggtagttatgttcaatacgatcgcaaactggatgcacgaatcgctcaaggcgtaatgtccattaatgcattcaaaggtgtagagattggtatcggattcgaagccggagtcattcggggatcacaggtgcatgatgaaatcatgcatacggatgaacgtggctaccaccgggcaaccaaccgtctgggtggattcgaaggtggtatgacaaacggtatgccagtcgttgtacgtggtgtgatgaagccgatcccaacgttgtataagccactgcaaagtgtcgatattgatacaaaagaagcatttacggctcaggttgagcgctcggacgcttgtgctgtaccagcagcgagtgtggttatggaacatgttgtagcgtgggaaattgccaaagcattcctggagaaattcggcggggattccatggaagagatccgtgctaatgttgctagttataacgctcaactggagaattactaatatgcgtcagctgacggtacagttggaggaacgctcatatccgattctgattggcagcggtcttttggcacaagcccctcaatattttgagcaatatgggttgaccaaaaaaagtccgttactcatcattacagatgaaaatgtggctcccaaatacttgtcaggtttggagcaaacgctgcgtacggctggttatacagtcgtatcggcggttgtaccctctggtgaaacatcgaaatccctttcggtgtatcaggatatgatgaccgttgcgatcgaaggcaaactggatcggagttctgcgattctggccttaggtggtggtgtcgtaggtgatctggctggttttgttgccgctacatatatgcgtggaatcaagtttgttcaagtacctacaacgattttggcgcatgacagcagtgtaggcggcaaggtggctgtcaatcatccgctggccaaaaatatgattggtgcattccaccagcccgagctagtgctctatgatgtggacacacttcaatccttgccgccacgagatgtatcggcagggttgtcagagatgctgaagcacgggctgatccgtgatgaggcttttgcacattggtgtgaggaacatgcggaagaactgcttgcgcttaatccggaagcacttggatacggtttggaacgtggatgtggcattaaggcggagattgtatccagagacgaacgtgaaaatggagaacgtgcgttgttgaacctgggacatacgattggtcatgccattgaagcgatcgccggttatggagaatttctgcacggagaagcgatctcgatcggtatggctggatcagcattgcttggtgagaagcttggtgcgccagcagggctctatgaagatacggtccgcatgttgcgttcacttcgccttccaacaacgatgcctgcgcatctcgacacggatgcattaatggaagcgatgatgcatgacaaaaagttccgtgaaggtcatatggtgtttatcattcctgatcggattggggctgcaagaattgtgaaggacgtacctgtgtcggcagttagggacgtcattgaaatgctcaggaagggagaataacagcgatggtcacacggggaattcgcggggctacaacagtcacgcagaacaacgaagaacagattttgaaggaaacggcagtattgttgcaggagatcgtggatcgcaatgagatccaaccggaagatatctgcagtgtgtggattacgttaactggggatctggatgctgctttcccggcaaaagctattcgccaactggatggctgggaactcgtaccactaatgtgtgcactggaggttcctgttaaaggtgccttggcgcagtgcattcgtttcatggtgcatgtcaatacaaacaaagctcagaatgaaatcaaccatgtatatctgaacggtgcacaggcattacgtccggatttggcaacaccttctggttcttaagtagtgggttgtcaaaccgatcataatgatgtatagtgagaaccagttgagtagagtagagattgagctgagagcagctgagctagtggagtatatagcagagtccagtgggtggtaaccggggcaacagaaaccggtcaactgattcacggtacgtcgtgctacggaataggtaacaggaacagggaaaacaaacgtgtcataggacatcttttgttttgatatattttggtacaaacacaatcaatgcactctcctatattttacgaaatattggaatgagtagttgaagtgttataactgatatattttcccgaattggatgatgtgagatgcatcaattcagcgacctgtgaataatccgacagcgaagtatagggacttgttatttatgaagcatcaccctgttaaatacagcttataaccaaacctctacctgatggtagaggtttttttgtacatataaccttttcttctacctaaatctgaaaggacgtgatctaatgataacgccaaatgttaatcaagtactgaaaatgtcgaatgagtataatctgattccggtagtcaaacggattctggcagatatggagactccgattcgaatattccgccgttatgctgacaacgaccgggcattcctgttggaaagtgtagaggggggtatccaatgggcgagatactcgttcatcggtacagatccgttcctgatgatttcggccaagaaaggccggattgttgtagaagaagcagggaagactcgtgaattgccaggcaaaccgatcgaagaactgaaagcactgctgcgtaagtatcgcagtccaaaagatgatgaactgccaccattcacaggtggggcaattggtttcttcggatatgatctgctgtcctattatgagaaacttccagctcacgcgctggatgacctgaatatggatgacattcgctttatgttctgtgaccagattatcgtgtttgaccatgtgaagcagcagatgctgctcgttggtaatgtacacgtcaaggacggtgcaacggatgacgagatacgtcaagcgtatgcagtgacttcggagaagctggagcaggccgcagaacgtttgcagcagcaaggaccaggagagaacctgaatccgcgttccattccgggagatgtggaactgggggatattcgctccaacctcacgaaggagcaatttatcggtaatgtagagcaagccaaagattacattcgcgcaggtgatatttttcaagtggtattatcccagcgtttccacattgatacggaagtttctccgcttcacgtgtatcgtgtgcttcggaccctgaatccatcaccttatatgtactacctcaaaatggatgatgagattatcgtgggtacttcgccagaagcgctggtcaaggtggacgggaatcgtgtggagacacgaccgattgcaggtacacgtccaaggggggcaacagaagcggaagatcgtgcactcgctgctgatctgctccaggatgagaaggaacgcgcggagcatctgatgctggttgatctgggtcgtaacgatctgggccgggtatccagcttcggcagtgtgaagtgtgacatgttcatggagattgaacgatattctcacgttatgcacatggtatccaacgttacgggcgagcttagagaagacaaggatttcttcgatgcgtttctctcatgcttgccagcgggtactgtatccggagcaccgaaactgcgtgcaatggagattatcgcggaactggagaaagaggcacgtggagcttatgcaggagcaatcggataccttggtttctcgggtaacatggactcatgtattacgattcgtacgattatttttaaaaaaggaaaagcatatgtacaggccggagcgggaatcgtatgggattctgtgcctgagaatgaatatgaggaaacggttaacaaagctaaagcattgctcaaggcgattcgaacagcagaagcaatgtttcccgccaaagaaaaggacagcacgttgagactggcgaatgcagactactttgtcacaccagcggccgctaagaactgagagaggagagaccggagatgaacataaacccaataatgaatgagaaccctgtaacccctattgctgagattactcgtgaggaaggcatgaaaaatggcctggcgaagattctagagggcagccatctggagcaagccgaagcaagagatttgatgtactcgatcatgagaggtgaggcaacgccggctcaaatcggaggtttgctgatggcgctacggatgaagggtgaaacggtagatgagatcaccggttttgctgaagccatgcgtggtcagggcggacgaattctaacggatggcagcggcttgctggacacttgtggaacaggtggatcgggtattcacaaattcaacatttccacagcatccgcgatcattgcttcggccgtctcggttcgggtcgccaaacatggcaaccgttcagcttcaggcaaagcgggtagtgcagatgtattagaggcactcggtgtaaatatccatctgaacggtgagcaggccagacaatgtctggatgatatcggaatctgcttctgttttgcccaggtatatcacccttccatgcgacatgcggcaggaccaagaaaagagctgggtgttcgtaccattttcaatatgctcggaccattaaccaatcctgcgggagcagatcgccaattgcttggcctgtatgatcgttcccggacgccgatgattgctgaagtactgaatcgtcttggtctcaaaagagcgttggtcgtggccagccatgatggtctggatgaaatcagtatctcggcaccaactcaggtatctgaacttcgcaatggtgaagtgcacacctatgatattgatccacgtgatatgggtttgtctctacatccgcttgaagcggtacttggaggagatgcggcacagaatgccgaaattattaagaggatcttccagggtgagcagagtgcctatcgtgatgtcgttctgttgaacgccggagcgtgcatctatgtatccggtcttgcagatagcattgctgaaggggtgacacttgccgcagaagcggtagattcgggcaaagctgccgggaagcttgaacagttaattcatacaacggaggcgtacagtcatgtatcttgatcgaatcgttgcaaccaaacataaagaagttgaagttcttgcacagacatttcgcatggatgaagctatccaaaaaatcgaacaactacccgcaactcgggggtttgaacaagcactatcaagcggacgcaatcgcaaactcggccttattgctgaagtgaagaaggcttcgccgtccaaagggttgatccgtccggattttcatccggtagagattgctgccgcttatgaacgagcaggtgcagactgcatctccgtattaacagatgtgtcgtattttcaagggagcaatgagtacttgcaggcgattcatcaagcggtgaacattccgctattgcgcaaggattttattatagatgaacgacagattgccgaggcaagattactgggtgcggatgcgatactgttgattgccagcattctgacacctgaacagattcgtcaatatctggaatttgccaaaagtttggggctggatgccttgattgaagtccatgatcgaacagaactggagcaggtattggagattccgcaggcaacacttgtgggcatcaacaatcgtaatttgaaaacattcgaaaccagtctgaacacgacactggatttgatggaattgattccaagtggcgttaccttgattagcgaaagtggtattgacggaccagaatcaacagtacctctgatccaggtcggtgttcatggtattctcgtaggtgagcatctcatgcgcaaggatgatgtcgaggcggctgtatatgatctgatggggcccaaatgatgaatacttccatacacgatggcacaggcgacagtatgtcagaactgagaaacccgttgccagcggccgtaaaaatatgtggacttcaggacgttgaagtgctaaaatcgatgataaacttgcctgtggattacattggtgttgtttttgccaaatcacgccgccgaatcgaacccgagcaggctgctgcattaagaacggtgttgttcgaatggtctacctatgatcggccgaagcttgcgggtgtatttgtgaatcctacgctcgaagaactggaacacattatggacattgctcagctggatgttattcaactgcatggacaggagactgcggaattttgccagcagctgaagcagcggtggaatgccgcagtgttcaaagttttttcttttcccaaagatgaaacgggaccggaagctgatgatgcagccataagggctcttgatacttatgataaatacgtggatgcgatattgcttgatacccatgatcctctatatggagggggctccgggaaaacgtttgcctgggagcgaatccctgcctatgctgaatgggcgaaaagtcgcggaattgctctgttcgttgcaggagggttgcagccggacaatgtacaacaactaatacagacatatgcacctttcggcgtcgatgtatccagcggcgtggagactgaaggtgtgaaggatattgccaaaattacagcattcgtagaaagggtgaagcaggcatgacacatcaattgccggatcaacacgggcgtttcggtcacttcggaggccgctttgtacctgagacactaatgaacgcacttattgagttggaggaggcatacagccacttctctgaagatgaggaatttaacaaggaactgaactatctgctaagcgagtattctggacgtgaaacgccattgtatcatgcagagcaattgtcacgccgattgggcggaccgaaaatttatctaaaacgtgaagatctcaatcatacaggcgcgcacaaaattaataacgccattggacaaggtttgcttgccaaacggatgggcaaaaagaaagttattgccgagacgggtgcaggtcaacatggcgttgcgaccgcaaccgtagccgcattgcttggactggaatgcaaagtatttatgggcgaagaagatacagagcgtcagcagttaaacgtatttcggatgaagctgctcggagcagaagtgattccggtgacgtctggaacacggacactgaaggatgctggtaatgaagcacttcgctactgggtcagcaatgtggaggatacgttctatgtgctcggatcagtggttggtcctcatccatatccgatgatggtgcggaatttccaacgtgtgattggtgatgagacccgtcgtcagattcaggagatcgaagggcgtttgccggatgtaattgtagccgctgttggtggaggaagtaatgcgattggtatgttctatccatttatcggtgatcaggatgtgaagcttgttggtgttgaagccgcaggtaaaggggtcgaaaccgagtatcacgctgcaacgatgaccaaaggcacgcatggtgtattccagggatctatgagttacctgttgcaggatgagtatggacaggttcagccagcgcattccatctcggccggacttgattatccgggtgttggtccggagcattcctatctcaaggatattgaacgtgcaaaatatgtaccgatcacggatcaggaagcactggatgccctgcaactcctatgtcggacggagggaatcattcctgctctggagtctgcacatgcggtagcccaagttgtcaaactggcgtctgaacttacagcagatgatattgtagtcatttgtctgtcgggacgtggagacaaggatgttgaatccatcatgaaatacacgggaggtgacttgggatgaatctgatggaccagaccttccagcaattgaaggaacagaatcgcacggcacttattccattcttaaccgtgggagacccggatgtggatacaacgattgatatcatcaaggagcttgaacaggctggagcggacattttggaactgggtgttccctattccgatccgcttgcagatggcccagtcattcagcgcgcttccgaacgtgcgctgaagagccagattaccattcgtactgttatggaaaccgctgcaaatgctcgtaaggcaggtgtgaaactgccgtttgtactgttcacctattataatccggtattgcagacaggcctggatgtattctttgatgaattggtcaaacacgatattagtggcatgatcattccggacctgccgattgaggaagcggaagagatgcgagaacgcgcaaatcgtgctggtgtgcatctggtgccgcttgttgcacctacatctaatgcccggattgagcggattgtaacgggcgcgaggggctttatctattgtgtatcatcccttggggtaaccggagagagagcttctttctttgatggcgtagagagctttattgagacggtgaaaagtctgacagacctccctgtagctgtaggttttggtatctccagtcatgagcaggtggcacatttctcccgcatctgcgatggcgttgttgtaggtagtgccattgttcgtcaggtggaagatgcgattcctctgcttgaaaatccggatacgcgtgcagcgggactgttgcaaattcgcaactttgtggcacaattaaagggatagagttgtcctgaaaggacatctttggacacataaggtgcacgctgattcgtgtctaacattatttcaataacaggaggcggtcgggttgaaaccgaaatcccagattgtcaatctgcctgtgtaccagccgggcaaaccgattgaagaagtgaaacgtgaactggggcttgaacaagtcatcaagctggcctccaacgaaaacccgtacggcagttctcctgccgccctggaagccattacgagagaaatgacgaatataagcatatacccagacggtagctcggttgagctgacgggagttcttgccaagcatcttggcgttgaacggaacaacttaatatttggttgtggttccgatgagattattgctttgatcacgagagctttcttcttgccgggtgacgagaccatcatggcagatcagacattttctgtatataaaagcaatgcagatattgagggtgccgtgtccatcgaagtgcctctgaaagatggcacgcatgatctgagcgcgatgctcgcgcaaattaacgacaaaaccaaagcagtatgggtgtgtaatccaaataatccgacaggtacgattatctccgagcaggaacttacagcctttatggaccgtgtgcctgctcatgtgatggtcatactggacgaagcttattatgaattcgtaaccgatgaagcatacccgcaaagtataccattgatcgaacggtatccgaacttggtcatcctgcggacattctccaaaatttacggtttggcttcgctccggatcgggtatggtattgcacgtcccgaaattattgatttgattaaccgtgtacgtgaaccgtttaacacctcccgttttggacaggttgcggcaaaagctgcactactggatcaggattttgttcaagagtgctcgaagcggaatgcaacggatcgggattacctgcaaaatgaatttgcacgcctcggattgtcgtatttcccttcacagggtaatttcattatggttgacctgaatatgccttcggcaaatgcgttccaatccttgctcaaacaaggcattatcgttcgctcaggattccacgtatacccaacttacattcgtgtgtccgtcggaacatcagaacagaaccgtgcatttgtcacggcactggagaacacgctggctgagaaggcggtagcacgcccttaatactggcgatgaaagagtgaggacccatgaaactaaaaattgcaatgattggtgtaggactcatcggcggttcactggcgctctgcttcaaaggcaagccagatgtaaccgtgatgggctacgcccacttggatgaactgaaggacaagtacatagcgagcggtgtagtggatgatgctacgctctctctggaagaagcggtagaggatgccgactttatttttttgtgcgttcccgtaggtttgctagaatcctatttcgaaaagctctccaagctgccattgaaaaaaggatgtatcatcacggacgtaggaagcactaaagcttccattgccgcttgtgccgagcatgtgcggttgactgacgcttacttcattggtggtcatcctatggcagggtcggagcgtgcaggcgtagatgcggcctcagctgtgttgtttgagaatgcatactatgtcttaaccccttcagaacatgtacctgaggaagcctacagcaggctgtctgagctgcttgcgtatacgcgggcacagatcgtgcgtgtggagcctctgctgcacgatgacatcgtgggggcgattagtcatctgccacatgttattgctgttgcgcttgtgaatcaggtgcgtgaatataatgagtcgaatccactgtataaaatgctggctgcaggcggttttcgggatattacccggattgcgtccagtgatgcgattgtgtggagagatatcttgcttagcaaccgtgatgtactgctgggcttgcttaaggactggaatagccagatgacggcctttacggatatgctggagcataagaacggtgaaggcatagaggaggcattccgtcaggcccgcgagttccgtagtatattaccagaacgacgcaaaggcatgatttcgccgttatttgatctgtatactgatgtccaggatgcaccgggtatgatcggtaagatcgcaactgagcttggggcgaatgatatcaacttgagcaacttggagattatcgaaaaccgggtggatgtgccgggcattatgcgtctgtctttccgtcaggaagaagatatggaacgagccaagacattattggattcattaggctatcaagtgtggatataagacgagaaagagggcgaaagccctcttttttgtgaggttatattggagttgttatttgattttcagtcacagaaaaaaggatgtattatcctgatttaccgaaagatataattaattcaaacaattttactgaaagtgttgacaaaatgaaaacgtatacatataataagggtacagtatggtttctctccactcctatccaataactgtattgctccacgtgagcaatggccgcttatgtaagcggtcttttttttgtcttaaaaagttatgggaaaggtattgatatgttaatagttacacttggacttacatcctctatttacatctccctccttaatctgttaggataccttagatccaataaatatcacatttttgtaaccttttcggtatatcgtccgtctatataagcaagggttaccaaaaaggctcaaaatgaagtcatgaacgtgaaaatgaccgcatatgaatgacaggtcgggttttgtggatgccaatggatttgccaggatgatgcagaccgttgtacaataaatactgttaatgtagaaacgttggggaaattgccattacataggggaatttggcgggaaggccagttatggcgctgaacgctttttatatgcggtgagaaccgcaacttttttgtgcctgttcggtaatacatggatagagtcgaacggggagaagcacatggatgggcgaggaggggtcgcactcaaatgacggattcccagttgattcgagagatcaaggaaggtaacctggagttatattccgagctgatgagtcgttatcagcgtaaaatactggctttcgtatatcatatgttgaaaagttccaatatggagctgcttgcggaagatctctgttctgagactttctataaggcgttccgcagtctgcactctttccgtgaggtggatgcctcattctcaacctggttatataccattgcgagaaatacggtactgagtgagcttcgcaaacagcgcagcggaaatgtcccacttgaagagagcgggattgttcccgttgctccttcggagaatacaccggagtatgctgtactacgcagcgagcgggtgatgctggttagggatgcgattaacaatttgccggagaagcagcgttctgcgattatactccgtgagtatgatcaactagactaccaagagattgcgaatattcttgggcagagcgtcagttctgtgaaatcgctattattcagagcaagatcaagcgtaaaaactcaattggaaccttatttcttcgaaccggtgtacgagccatatgaagggatgaagaaccgatgaattgcaatgaagcccaggaactgtttgcactggtctgggacttgccggaaactcatcctcagcggattgcatttcatgctcatctcgctggttgtgaagagtgctccgagcagtttgaggtctgggaagaagctcagatcttgctgcacagcattccggttccagtgacagaacaacaagcagagagagtgaaccgtaacgttatggaccggatctacgcggagtctccatggttactgccggaagaggtaaaggttaatcgtttctctgctgtgatccgcaagcatatgtctttgtggattgccgcgttcctggctatttttttatgcagctttctgtatatggcaatgtttaagccagacgtatcagaagctgagcaaaccaaagttgttactacgggtatcctggagacaggggttgccggaagcggaccatcgtcctctggaatgtatcagtacaacatgactggagcggacagaggaagtatcatagaaccttttgttgtgagcatgggacctgcttatccgcagtattggatggccctctctttacttgcaataggaatggcgttattttctcttggacgtatgcatcgaacaacgaataaacgcaaacaaggtgcgagtgcataggtaataacctttcgttcgccgtgtggagaaatgagggatgtaagtgcgaatcgggcttattcgtcacggtcttacagactggaatgcggcgggccgtatacagggtcagacggatattcctctgaatggagaaggtcgtgaacaggcagagcgcctgggaagacgtctgctgacggaagaataccaatgggactatatcatcacaagtggattatcgcgggcacaggaaacaggggagattatctccaagctgttgaatgtacctttgctcaagccagacgcacggttgaaagaaagggcttttggtcagattgaaggtctgacttcagaagaacgggttgcccgttggggccaatcctgggagacattggacttgggacaggagcagatagcggatatccagattcgtgcactggcgtttctggaagatctatggtctgcctattcggaccaaaacgtactcattgtcactcacggagctttcttagccaacctgttaacagctttgtttaaagatcggtatacagaacgcattggaaacctgtcactgacgatcctggaaaaggaacgtgatgactggagtccactgttatataattgcacacgacatctatctttggacacagcgaaacaacctgagtaatccaacttgggttgtttttttgcgttttatgggggaataaagactgtatatgatttcaaaactctcatttttcttctgattgaccaactcggggcatagtatggtttaaaacataaaagatttccaaaaagaggtttagattatgggaattccgtcaacgatgtttacaaaaccaaactatttcaggctccgaatcagcagtcgaagtagttaacgggcgaggcgatggacccatgaatctagcggatatgcttacttttgccgatattggccagcttaatcgaatagcagactattaccaatgtgaatgcaagcccaattccaaacatgaactcatccagagtattctcactacattgggcagcagacccttttttgagcagcaggtacgtcaactgaatcaagcagatcagcgctttttgaacaacttgttgtttgatcctcgccagtattatggtatggaagaactcattgccatagcccgtcaatcgatggacaaaaaggagagtgaggctggcgcaagtccacgtgatctcatcgttcgcttcaataagagtggatggttgttcaatgggacaacgcagcagaccaggtatttgtatcaggtaccccaggatctgaaattaagattcagggatgtgttatccacacatctgcgagcagggattaccaaaacaacggaaccaaccatgtatcgggatgaatatcatctcttagcggatgatctcaagttgttcctgcagtttgtccagcagcacgaaattgcccttaacgctgaaggcatgatgtaccgtcgctctcaacagcagattatggagcatctgcacattagtgaggaattggtgggcaaaggtggatggagattcggatatggccgttccttcaaggattacccggatcgtttcgcacttctctacgactatgcatttcaccatcggctggttcgtgaggagcaaggcacgctgaagttatcaccagctggagaagacaagctgggagctgagaaaacagccgaaatgatacagctatttaggttttggttaagattgtataaaggtgctattcccaatctgtcctctattgtgtattggacaggcgaatgtgcccaagaatggtcaaccgccgagtcgctgtttcgtcagatcggtccgttcattcagccgttttactatgatacggctgaggccatttatgataacagaattgttaaaatgatgttgcatcttggcatgatccgtattggagaacatgaggaaggcaggactatacaaatgacagcctggggcacacgtcttgctgcatcctgtcgctccatctccggagacattacacctattttgtttgacaagtgaaggacaagttgctaaaatcactcccaaattaaggagtgataataatgataattccatacaaaggtctacaacctcagttacacccttcggtatatatggctgaaggtgcaaaactgatcggtgatttgagaatgggagaagagtcttccgtctggttcaatgcagtcctgcgggctgatttggctcctattatcattggaaagcgctgtaatattcaagataacgttgtcgggcatgtcaatactgatcaacctttgattgtgggagatgatgtctcagtaggacatacagcgatcattcatggttgttgtattggaacaggatcattaatcggcatgggagccattctgctgaatggagccgatattggcgaatatacgctgattggagccggttctgttgttactgagaatagtaaaattccgccctatactcttgctttgggaacacctgccaaagtgatacgtgagctgactgatgctgatctggagcggatgtccagaacttcactgggttatgttaacaaaggaaaagaatataggagctcttaaatccgttttggaggtgcatcctattggataaaatgaaagttacgtatgaagtcatgttggggctggcagctgagatggtttgggacgaagcgcttcgcaaacagcgcagcgagaagctctatttggaaatcgataaagcgttagctaccggagacgaagtagctttccggagtctgacggatgaactgaggaccataaactgattagcaaaatagttcctttctgagataaaagggaatgcgcagatgcgtgtttcctttttttatatgtgtaattccgaaatgaatgtctggatttataagatatagtcatatataatatgggaataaaatggatagagaggggatatagggaattgaaattcagtgagatgactcaagacagctgggctgaactgcaactctatctggatacatgccttattccatacacagctcttagcggtgagcagtcgccagttgaagctaccgaggcgctggagcggctgagagattttctggatatggtcgaaattcctttcaaagggagaatcatgacttatccagcctttcattatgctaattcggaattgtcaatgacattaaattccttgtccgaacagcttaaatcctcaggattcaaatatgtggttattatgtcatcagatggtcattgggatggcgtggaaattccagctgctgatctggttttgagtcggtccgtcttaactcatgaggttggagaagaagggattgcgagatttgtaggggaaaagatacgagagttgtggaaaaaatagtttttagcgacaaatgtgacaattttacaacatttttttaataacgcttacaattgaaccttaaaaatgtgtgacaaattcttgacggtgttctagggctactatatgattatgtatgttctagtaagtcgtggaatttatgaaaatgaaaacgtttgagagagttggctgaaaaagggggttggagacagtatgagcagtgagcatgaccaccacgaagcttcattgaaattgccaagccgcatggagatgtcacgcaggcagtttttgacgtacacgcttggtggagctacagcctacatggccgccggtgcaatccttcctatggtccgttttgcggtggacccgattttgcaacataagggagaaggcacctctgtcaaagtagctgaaatcagcaaaattacgaatgagcctcaagaattcacctttgaacttaaacaacaagatggttggtatctgagtaatgcatcgttagtggcgtggattcgcaaagacgagcagggtaaaatttatgcactctcacctatctgtaaacatctgggatgtacagtaggctggaatagtgacaagcagtaccctgacgagtatcattgcccctgccatggcgcgcactatgacaaggaagggaagaatcttgccgtagcccccaaaccgctggatgagtacgtagtcaaggaagagcagggttgggtatatctgggcgacattgttccgaacacccgagtgaattaggaggcgtgaacgcagatgtttaaaaatgtctatgactggattgacgagcgtcttgacatcacgccaatctggcgggacgttgcggatcatgaagttccagagcatgtaaatccggctcatcacttttccgcattcgtgtactgctttggtggcttgacgttctttattactgttattcagattctgtcaggcatgttcctgaccatgtattatgtacctgatattatcaatgcctacgctagtgtggagtacctgcagaccaaagtagccttcggccaaattgttcgcggcatgcaccactggggagccagtctggttatcgtaatgatgttcttacatacgatgcgtgtgttctttacaggctcttacaaggcaccgcgtgaaatgaactgggttgttggcatgctgatctttttcgtcatgttgggcctggggctgacagggtacttgttgccatgggataacaaagcctattttgcaacaaaagtaacactggagattgccaatacggttccttggctgggaccgattattaaagaattcctgcaaggcggtacgattgttggtgcacagacactaacccgattctttgccctgcacgtattcttcctccccgctgtgcttctggtgcttctggtcggacactttatcatgatccgcagacagggcatttcgggaccactataaactgagaagggaggaatcgcaatggctcacggacataagaaggatgatgaggaaaaggttatctttgtcggtgattcacgggtccgtaaaggggcgggattcattacccctcctgattacacggcgtatcccggcaaatcagaagcctttatccccaacttcctgctgaaagaatggatggttggtgtcgttgtattggtggggattctggttctcacgatctcagaacctgcacctttgggctatccggccaatccgagcgcatccgtaattcctatgccggactggtacttcctttttctgtatcagtacttgaagtatccatatgcatcgggcgattacgttctgctcggcgtactgggggtcagcggagtcgcttttggagctttgctactggcaccattcctggatacaggcaaggagcggcgtttctataaacgcccaattgcttcatcactgatgattttgtcggtcatttctgtattctacctgactaatgtagcgtggacgcactacgagcatgagttggaagcaagtggacagaagcctgaacatattcaacgtgaagaagaagcgctggagaggcgtgaacaggggctcccacccgtttccaatgcacctggacagcaagaagaagttgcgatcgtggaacaggatgatcctgcaatggaaacgtacaaaaaggctggatgtattggttgccatgcggctgatatgaagggcgcaagtggaccttcacttcggggtgtgggtgacaagcatagccaagaagagattctgaccattattaaagatggttataacgagatgcctgcgatgtacaatcaagcgattgctcaaggcgtcacggatgaagagattactcatctgaccgaatggcttgcgaaacagaaagcagaacagtaaaatcaaaataaccaaagaaacctgatcgtttatgcggtcaggttttttgaagtgttttttttggacagcactgtatcgtgcacaatatatgatgaaggaaggggcagggattgtggctttatcgtatttctggagtagggaatttctaaccaatcgttatttcctgtggctattattttggtgtaatgcggtaggaacggtatacggatacatctggtacggagagcaaatgaaattgacgctggctgagcagccggtgtggcagatcgtatttgtgccagatagcccaacagcgagtttgttttttactttagcgttgttatgggtcttgtacccaccacggtccatcattatcaaacggatcggacatgtgattcaggcgcttgccgtggttacatctgtgaaatatggcgtgtgggccgtatccattatttttgctggctggatgcaaggcggtacacagcactggcaagactggatgttgattgcttcgcatagtgcgatggccattgaagctcttatttatgtacgctttttcggcttccgctgggcttcccttgtcgttgcaggtctttggacgctgttgaacgatacgatggattatacatatgatatttacccttggttacccgcttccctctatgatcatgtagatggtgtgcgtaatttcacattcggactgacactggtaagcattctgtgcgcgtggctggccttaagacaggcgaaacgaacctgatatccgatcttgagcttgttctaatgaactgtcccccgccatacattggtggtgggagggatgtccatgaagagaacgtttgggatcaaaactggcttattggtggtatcgtttatagctataatgctgtggacgaacttagcatatcgtgtatccgcgcaaagtgaagcattgaattcgaattcagatcagcaagtgtccacaagcaattcaattgcacaactgaatgaggaagcagccatattgtatcgtcaggcgctcgagaataatattgaagaagtgcgcggaagcattctgcgtatcagtaaaagtctggagcatatctcctttgagggacaaacaacagtcgagggcattcacgccttgtccgaaaccatagttgaagtgaaacaagccgttgtgaaggtgaaaaatgacgatgcttctcttcagcagtcctcagccaagctcagacttgcagcagatagtctcgcgaatccaaccaagcctttatggcttcaatattataaaatcgtgaaaaacgatctggacgctttatccgctgctacaaatcaagggcaaactgcggccgtactggcaaaccgctacaccgttctggaggagcattatgagacgattcgtcctgccgcactgattggccgtgaaccgtatgaaattgctcagatagacgcctggttatctcataccaaagggcttaccgctgccaagcaacctgatctggctcaattaaagagcatggttggccatggggaggaactggtgaacaagttgtttggtcgcgagaaggacgagagtgcctttgtaccgtttgtacagggtcctgatcgcagggcagcggggctgctcattagttcggtcattgtggcaacgttaagttacgccggatatcgtaaatatcgtgcgcagcagcaggggatttttccttttcggcgttaatagaacatgaacttgatcctggcctataagtggtatataaaaaaagacctctttccgcatgaatagccatgctaacggctcttcatgtaaaaaagaggttttcttgtagtttctgtgttatatcagctttctttgaatccttcgccatgtacatcgtgaacatcgctgatgatgacaaatgctctgggatcaatggcgcgtacaatcgtctgcagacgcctgaactcttgcctggagatcacgcagtaggccatgtgtttggcctgtttagagtatgcaccaatggctggaatgagagtgacgccacgatccatatcccgtgtgatctggtccgcaatctcgggtgcatggtcactaatgatcataaatgcccgggcagaatatgcaccttcctgaataaagtcgatgactttggaggcgatgaatacagctacaagcgtgtacagaattttttctttggggatgtagatgagagagagcccgataatgacaaagtcgatgcccagtaatactcggcccatgctccatccatacttgcggttcataatacgggcaatgatgtctgaaccgcccgtcgttccgccccaacggaatacaatgccaaggccggctccaagggtgacacctgcatatagggctgcgagcaggaggtcattctcggtatgtaatggttcaatccagcccagatgaatcaacttctcaaacaaccatagaaaaacggtcagtgccccgattccgatacccgtatagatcatctgtctgccgcccaaaattttgagcccaatcagaaagaggggaacattcagaatcaaggttgtaagtgaaggtgagatgccaaaagcgtaattgatcagcagcgtaaccccggtgaggccaccttccataagctggttggggataatgaaatagaggagcccaaaggcatataaggctgtacccagtacgatgggaagaaccagtttaacttgtatccaggttttggcagtgctcataagatccctcgctgtagataaattagaatgaagaagcaatcattcccatctagtatacctgtttattgattctttaaaaatgatttgtcgctgatgatggtggaagtgaatctaaataactgatattattaggaacaaatacgacatcatttcaaaggagaatccgttctcatggagaaaagcatcgcagaaatgcagcgtgaggttgatcagtatatctcccagttcaaggaggggtacttcagtcctctggccatgttggcccggatgtctgaagaggttggggagctcgccagggaagtgaatcatgaattcggcgagaagccgaagaaatcttccgaagcagccaattccattgaacttgagcttggagatattttatttatcacgatttgttttgcgaactcactgggaattgatctggctgaggcgcacgataaagtcatgcataaatttaacacccgcgatgccaatcggtggactcccaaaaacaccgattaggcgtagattacatatgctgtaccatcacccgatcggggagggtcagcttaatgatgaaaccggaagaatatatgcagcaggcttaccgctgtatattgcaaaatgattttgagcaggcgattcgttggttcgagtcagccattcacgctcatccaaaacatgcggagttatattatcgctgttccattacacacgcccgcagcaaacatctggttccagcgcttgaatatgcgcgcaagtcggttgaactgtcgccaggaacagaagagtatattttgcatctgcagacgttggaagcaaaacaattgacctccagagcgaagttgctgttggagcaggcgggtattgcaacacaggagcgctatgtggaagcgtctacgcttctgcaagaagcggtcaaacttgatccgctctcagtggaagctcatgttatgcttgcgctggcttacagtgatttgaatgaatttgactatgcaattcaggcgctacgtgaggcgattttgctggatccgcagaatgggcaactgcatcagatgttacaggaaatcaagcaacgtatgaaatccattcaataagaattcattttgcaaagatttctttcgagttgaaatggattctacgatatgatccaacatagtgaggagatgcagtcaatatgagtgaagtaatcagagttgccgtgatcggagcggctggccgtatgggccgtgaagttgtgaaattggtacttcaggacccggaattggagcttgcagcggctgtcaaccgctccggagcaggcacggatgcaggaacccttgttggtttgccagagtgtggggtgctggtgactgatgatatcgaaatggcttttgccgaaacaaaacctcaggttatggttgattttacagtaccacaatttgcgtttgcacatactgagatcgcgatccgtcatggagtcagacctgtcatgggtgttactggcttcacgccggagcagatcgaacagttggacaagcagtgccaggacaaaggaattggagggcttattgcccctaacttctcgattggtgccattttgatgatgcgattcgcagcacaggctgccaaacatatgccaaatgtggagatcatcgaatatcacggagatcagaagctggatgctccttcaggaactgcgatcaaaacagcggaactgattgctgccaatcgggaagaacttcgtcaaggtaatccgaatgaggaagaaacgattgaaggatcacgcggcgggtattacaatggcttccgaattcacagtgtacgattgcctggtgtattcgcgcagcaggaagttgttttcggagattatggacagtcacttaaaattcggcatgactcctacgagcgcgcaggttatatgcctggtgttaagattggtgtgcaaaaggttatggagtatacaggaatgatctacggatttgaccactttatcgactaaaggagattgtcatgttgaaaatagcatttatcgcccatgatcgtaaaaaagaagagatggttaacttcgtgacggcatatgagcctgtttttacggaccatcaattatattctacaggaacaacaggccttcgtattatggaaggaacgtcgctgaagattcatcgattcgaatcaggcccattgggcggagatcaacagattggagctttggttgcgcaaaatgagatggatctgattattttcctgcgcgatccactgatggcacaacctcacgagccggatattaatgcgttgctacgtctttgtgatgtgcagggtattccacttgccaccaatatcgcaaccgctgagattctggtcaaggctctggatcgtggcgattttgcctggagagagctggtacataaatacaagccggaggctggattgaattcgggtgattccgaatgagtctggatattctcatctttggagcacatgcagacgatgcggagattggtatgggtggaacgattgccaaacataccgctgccggcttgaaagtaggcgtgtgtgatctgactcgtgctgagatgtcttccaacggaacagtagagcgcagaaccgaggaagcggagcaagcctcccgcgtcctcggtctttcgtgtcgaacgaatctggggcttcctgatcgtggcttatatcttacgcctgaacatgtacaggcggtgacggctgagatacggcgtcatgcccctcggatggtgtttgctccgtattgggaagatcgtcatccggatcatgtcaattgcagtaagcttgtgcaggaggctgtatttaacgctaagcttcgcaactatatgccggacatgcctgccgtgcaggtgaaggaactttatttttactttattaatgacatcgggcctacggatttgattgtcgatattacggaacactatgagcaaaaagaagcatcactgctctcttatcgttcccaattcgaactgagagacggagcggtctcgacgccattgaatcaagggtatattgaacgtgtaagagcccgtgattccttgctcggacaacgcagtctcatcccgtttgcagaaggttttgctacaattacgccttacgtggttcatcaatttggccagggtgcccaataagcgatttcacattttacgtttaatgaaacgaagggtttcattattccattgcattatatcaacctgcatgaagcgggagatcaaaggagcgtccacaggatggataaaaagctaaaaatcggcattacctgttatccgtccctcggcgggtctggcgttgtcgcaacggaactgggcaaattacttgccgaacaggggcatcaggttcattttatcgccaacagtatcccgttcagactgggtacgttccagaaaaatattttttatcacgaagttgaagtaaatgattattatgttttccgttaccctccgtatgacctgtcactggcaacaaagatggctcaggtggctaagtcacagcagctggatctgctgcatgttcattatgccgtgccacacgcagtatgtgcctttctggcgaaacaaatggtaggggacggccttaaagtggttaccacgttacatggaacggatattacggttctggctcaggatgaatctctgaaggatctgatccgtctagccattaatgaaagtgacgcggttactgccgtatcacaagatttgattcgagaaacggtcgaattgctggatattcagcgtccaatcgatctaacctataattttattgacaaacgaatatattatccgcgggatgctgccagtctgcgaagagactttgctacgcctgacgaaaaaatattaatgcacatctccaatttccgaccggtgaaaagaactcaggatgtggtagaggtcttccgtcaggtacaggagcaggttcctgccaaactgttatttgttggtgaaggacctgatttgccgaagatgcaatggaagattaatgatctcggcttgaatgataaagttcatttccttggcaaacaggatgacattgctcaggtcatctccatggcggacgtgttgatgcttccatcggagaaggaaagtttcggacttgtggcgctcgaagcaatggcttgtggcgtacccacgatcggttcacaggccggaggaattccggaactggtcttacatggtaagacgggttatttatccgcgatcggggatacacaatccatggccgagaacaccatccgtttattgacggacgatcgtttggctgctgagttcagggaagcatgtcttcagcgcgcgcatcacgacttttgcaatgatgctattcggcatgaatatgaacagatatattaccgggtgttgggaagggaagttccgaatctgaagccggtttgcggttaatcatttctttgacgaaatcatactgtgcataccacaacaggcaagagaagaggtgatatgtggtggttcaatggacacaggtagatcgtgaaatggcaatgcaaagtgagaatgtactcacaacattaaacaaacatggctacaaggcatattgggtaggtggttgcgttcgtgacgaattgctggaacgtgttgtggacgatatggatatcacgacatctgcttctcctgagcaagtcatggaactgtttgacgattgtattcctacaggtttacaacacggtacggttaccgttcgttcaggcggttattactttgaagtgaccacatttcgaacagaatccgaatatcaggataaccgcagacctgctgcggttcaatttgttcaggatatcaaggaagacttacagcggcgcgacttcacgatgaacgctcttgctatggacgtcactgggacaatcgttgacccgttcggtggacaggcagatatcaaggaagagcgagtcagatgtgtgggttctgcgatggaacgatttggtgaagatgcactgcggatgctccgctgtgtccggtttgcttccgtatttgatttcaaaattgcccataacacgtggaagggtcttgtaaggcagaaagacctgcttcaacatatagcaatggaacgggtacgtaccgagatggtaaaaatgatgtctggaccgcatcctttaagagggttggagctgttatacagaagtgattcccttgcgcatatcaaagcgctggtaagctcgacccgatttaacaagatgttgttatccaatttggaacaattgtcaggtcagcatgtgttgcttcgttggtcactcatcctgattgctggcggttatagcaaggatgaagcagatgtattattacgtcagtggacattctccaatgaacatcgttctcgtataacaggggtcctccaggtggaacagttgattcatgcttccattcaggagccgaaggatacggtcagtctccgttccgattggatcgttactgttctggcttgtggcgttcaggcggcgggtgattggcttcgaatacagtctacactgccagcaggatggcggaatcagtccgaacaggcagaaatacaggttgttttggttcaagagcttgcaggcgaatggagtcaatcgatccctgtgcatgacttgaaagagttggatattacaggggaacaagtgttacaaatggtgcagcgcaaaggcgggccttggctggggcaactaatgaaacatttgttacgagaaacggcgattggaacgatagcgaatcagcatgaagcactaagtgcagaagtgaagcgggtggttcaagatgaccaaacatgaagatctgttacatatgttattaaatgcagaaggacgattcgtatcgggtgaagagatcagccgtaatctgtccatcagtcggaccgctgtgtggaaacatgtgaacaagttgcgagacatgggttatgagtttgaagcggtatcccgcaaaggataccgtctgttaacgaagccggatagcattgaccctactggcctccaattggccctggatacaaccgtatttggccgtaaggctgttttgttggcttcgaccctgtctacgcaaggggatgttctcaagctagctgagcaagggcaggcagaaggcgctgtggtcattgcggaagaacaaacaggaggaagaggacgtttcggtcgacagtggttctctcctccggataaaggaatctggatgagtgtcctgttacgccctgatctaccacttcagcatacgccgcagctaactttattaacaggagtggctgtatgtcgtgccgttcgagcttgttcaggagctgatgcgggcatcaaatggccaaatgatgtgttgattgacggacgcaaggtatgtggcatattgcttgaatctacggtagaagatcatgaagtcagatactgtatcgcaggtataggcgttgacgtgaactttgatcccgaggattatccggaagatctgaccacaatcgctacttcgctcaagatggagacgggtcaatccgttgatcgcaccaaactaacggctgccattttgacggagcttgaacagttgtattttttgtatcaaaaagaaggatttggcgtgatctcagctctatgggaggccctgtccgtatcgatgaatcgagagattacagtgacgaatcctcatggtgtcattgaagggaaggcaattggtcttgacccttctggtgcacttatcgtggagaagcacgatggagaacatacactaatcatctctggtgagatttcctggaaatcataaacaatttgtcgaattttcactggtaaaatgaacataagacgtgaagtttgagcagaactttggtatactgtgttcgtgaggcgatatcggctaatgtagaccgaattgcactcccgtaacagtaacctttgttctgctttgatgtgttttatataagcagaccgcagtgcaagaatgaaatacgtttaagtgagttgttggattctgctctgagccgaagaggaccgagacagaagggacgatcgcaagtgactcttttttgacttttcgggactttttagtggaaaactaaaaggtttttttgttgcgtttatttgaaaagaagaaaggagccatgaaaaaaaatggcgaacaaacaagcgttgaatattgtgaaaatgaaaaaatataagcaggatggcgtgccgcttaccatgatcacggcttacgattatccaacagcgctcctagcagaggaagcaggtattgatctgatcctggttggtgattcactcggcaatgtagtactgggttataattcgacgcttccggtgaccatcgacgacatggtataccacacacgttccgtagtgcgcggtgctgagaagacatttattgtggctgatatgccttttatgacctatcatggcagcgtggatgagacgcttaagggtgtccgtcgactgatgcaagaggggcatgcccatgcggttaaaatggaaggcggagtcgagatagcggacaccgtcagagcagttgtgcaagcaggcgtgcctgttcttggacatatcggactgacacctcaatcggttaatcagattggtggttaccgcattcagggcaaggatgcagcggatgcgaaacgtctgatggacgaagccaaagccctggaagctgcaggtgcgtttggcattgtgcttgaactggttacggaagaagttgcacgggcgatctcggaggaactgtccatccctaccatcggaattggagcaggacgaggctgtgatggtcaggtactggtattccacgatgtggttcaatatgcctctccgtatacgcccaaacgatttgtcaaaacctatggagatgtgggtacattaatcagaaccagcatcgaagcttacgtgaaagaagtgaaagatcgttcgttcccggccgaagagcatgtattcaatgcggcggatggtgttctggatcagctgtacggcggacaacgcaaggaaaaggtggggagtaactcatgaaagtattacggacaatcgcagagttaagacaggaactaagtttgaagcgtcaagcgattcggtccagtgcgtctgttgtaggtcttgtaccaacaatgggttatcttcatcaaggtcatgcaagcttgatgcaggcagccagacaacagagcgatatcgtggtattaagcatatttgttaatccaattcaatttggccctaatgaagattttgacagttatccgcgggatgaagccagagatgtggaaacagcacgctcacaaggagtggatatcgtatttattccctctgttgaagagatgtatccacaggcaacgcaaacgaccgtatctgtctcaaaactgacggagcgcttatgtggcgcttcacgtccaggacattttgacggagtaacaactgtagtctccaagctcttcaacagcgtacagccacagcgtgcattttttggaatgaaagacgctcagcaggttgcggtcattcaacagatggtgaatgatttgaatatgcctgtagaaattgtaccctgtccgattgttcgcgaagaggatggtcttgctctcagttcacgtaatgtctatcttagcgcagaacagcgtacacaggccttggttctgtcgaaggcactgcgtgcagctcaggaagccgcagatacaggtgtagctactacagccgcagatatccgtcgtattctgcgcgagcacattgcaacctcaccgcttgccgttatcgactacgccgagattcaggcttttccaagtctggagccgctcacagatcaggaagaagttcaaggccgtgacgatctgctcattgcacttgcggtgaaattcggaaaaacaagattgattgacaatataaggttgcaaaaatcggaggtactgtcccatgtttagaacactgatgaaatccaaaattcaccgggctacggtaacggaagccaacttgaactatgtgggtagtattaccatagatgaagacttgatggaaacatccgacttgatggaaaacgagaaagtgcaaattgtgaacaacaacaatggtgcacgtctggaaacatatgtgattccaggaccacgcggaagcggggtcatatgtcttaacggcgcagctgcacgtctggtacagcctggagataacgtcattatcatttcttacgccatgatgtcgcaagaagaggcaaatactcacaaaccaaccgttgtatttgtagatgggcagaataaacctgtacaaacgatgaaacaggaagtccacgcaacaattatgtaatcgactggtaaggagaatgaaatcggcccttgaagcaaaaaatgagtacaggtcactgcactaatccattttttcaagggtggggatgcatcgatgttccagcatgttttcgcagaaatgaacgacatgttagatgaaattatcaagagctatccttccgctgaaggcctgaacaaacaagaattgctgcaaaagtggaacttgcttaagcggatgagtgacggaatgttggatgaatggctgatgtttgaagaaaagatgagccaggtgagggagcgggagatggataagcctgcttcccttgaaccggaacaggaagctgttaccgctctgcctgaactccatctggaatgtttcagtcgaggtcagggttatttcaaattacagatgtatccgcaggcgatcatgcagttctcccgggttgtgaccgaccatccggagagtgcattgactcgtttttacctggcgctcgcgtatctgaatctggaacaaatggcggaagccggaacacatttacagcagatcatgtaccttaaaggttcacctcgcttgaaaggacttgtgtgtaacgccctgggctgtattcaagtcaagcttgcgaatcccgaagctgcatgttcactctttgcacaggcccttcagtatgacccgacattgaccgaaccactgtacaacatggaagcttgcaggttgaacaggggaaaattgcaatatgctaatcagctgacgacccttcattaagcgggaattcggcgacaaaaaaacggtgttccctcctttggcatagcggcggggacaccgcttttttgtcagttaattttcaaatccccttttttttgctatgctgtaacatagactggaatggaagggaccgtacattgcaatgaaatttgccgtattggatttcgaaacaaccggcacgcagtccgacggtgagattatacaggccggacttgccatcatagaccatgactacagcataactcaaatatatagttcttatgtgaaccctggtgtaccgattcccccgtttatttcggggttgacgggtattaccgatgcagatgtggcggacgctccttcactcgaagagatgatgatggagatggttccgctacttaatgatgtggtgcttgttggacacaacgtcgcttttgattttcactttttgcagaatgctcttgaccgttgcggttatttgccgttcactggccgcattctggacacgattgattttctgaagatcacattcccatcactgggttcttatcaactcggttatgtgtcttccgaatttggatttcaacatgatcgccctcaccaagcagacagtgatgcactggcgacagcctatgtgctgctcaagtgtctggatgagttaaaggaattaccgctcataacgattcagcgcctcagtgacctgtttgcaccagaagacagtgacttgggctggttcttggacgggatgcgcagtgagaaggaagcagagccgattcaggatctggacggacatacctattatcgtcagcttgctcttaatgtaagtgattggaccgatattggtgcaccacgcgatgagcgggaggctaaccccctcgatggtgtaagcttcgaacagtttatggaccaggttcgggagaacctgaaggatacgctggatcattacgaagagcgtgaagcgcagactcagatgttcagcagtgtaaggcaagccctggatgaagagaaacatctcttgatcgaagctggaacgggtaccggtaaatctctagggtatctgttgcctgctatttacgaaagtgtgaagcaagaacagaaagttatggttagcacgcatacgatcaatctgcaggagcaattgagagagcgggacattccgatgctgactcaagtggttccgttcccgtttaaggctgctgtattcaaaggacgtggacattacctgtgcctgcgcaaatttgaacacaaaatcaataaacgtgaattcgccacaccgaaagaggattatttcacagctgctcagatgatcgtctggcttacgcagaccgaaaccggagatgatgaggaacttaaccttagcggacgcggaggggacttctgggagaccgtacagagtgaatccgaatcatgtctgggaagatcctgtccatggttccgtaaatgcttctaccatcgtgccaaacatgaagcagggttgtctgatatcgtaatcaccaatcactccaaattatttacggatgtgaaagccgcgcatcagctgctgccagcctatgagagtcttgtgatcgatgaggcacatcatctggaggatgtcgctggtaaacatcttggaatgcatatgaaatatttcaccttggttcatacactgacccgcctatttaaagacagtcgtaatggtcagctgcctatgcttcgttcgcagttatccgggcatgaaaattcggtgcaatggggctccatggtggatcagatgttcccgctcgctcttgaagttaaggagctgtgggatcgtatgagcgatgccttgtttggtctgttgcctgaacgaagtgatgcttcaccgggagagacggggcaattttcactgcgtctgaaagcatctcagaaacctgcaaaatggcaggagttgcaggatctggagaaccagatctatgtgactctgggcgatttggttcgcaaaggggacaaattgctgcttgaggtgaaagaagatcaggatgattatcaatcggatagtctgatcacggacattacaggactgctgaaagatctgaccacattgaaggagaatctacgtttcttcatgcgtatggatgatgccaaaacggtgtactggatggaagccagcggccaattccgcagcaaatctctccagctgtatgccgtacctgtagatgtgagtgcacaacttaaggatttattttttgataaaaagaaaagtgttgtgcttacatcggctacgctttcggtagataagtcattccagttcatgattgaacagcttggcttgcaggaagcggccgagaacaatcggctgttaacgtcgatgttgccatcacctttcaactatcgcgatcaggcacttctggtgattccgcgtgatttcccgagtgtgaagggaagtgtgggtgatgcgcactttgttaatatgctggtgcaatcacttgcagagacggcaattgctacgcgtggacgcatgatggttctgtttacttcatacaagatgttgcgacaggtctatgatccgctgaaggaggcactgtctggcaacgacatctcgttgcttgggcaaggcgttgacagtggaagtcgttccaaattgactcgcaggtttcaagatgccaaagcaacggtacttctgggcacaagcagcttctgggagggtgtagatatcccgggagacgcgctaacctgtctcgctattgttcgactgcctttccagccaccgaatcatccgttggtggaagccaagagtgagctgcttcaggaacagaagaaaaatccgttcatgaaactgtccgtgccacaagcggtcattcgtttcaaacagggatttggccgattggtgcgtacagcaaaggacagaggaattgtcattgtttatgatacacgggtgattgaagcgtactatggtaaattctttttatattcattacctggtcccaaaatggaacacatgctcacggagcagatggttccacgaattaccgagtggttggaaaaacctgctaatgaacaaaaataatggttgttttgttcgttatatcattgcatgacactatcgtttggcgttaaactttattagatatttccgtatccgattaaagcagttgcacgtaagaacttataacccaaattacaaggagcattctgtataaaatgtcacgtttatctttgagttttatacagaatgctcatcttttcatctattattttatcgtggccttggtaagggggagcaagaatgaaatcggataaaatttcggaagcggtggtacgacgtctgcctgtatacttgcgttatttgaacgagttgcatcagcgtgaggtggctactgtttcttctcaagagcttggacagaggctggatctgaatccggcccaaattcgtaaagacctggcttacttcggtgattttggtcgtaaagggatcgggtatgatgtatcctatttgatcgagaaaattcgtcacattctcaaaatcgatcagcaaattaatgtagctctggtaggagcgggtaacctcggtcaggccttgtccaactacaacgcatatctgaaagacaacatgaagattgttgcagtatttgatgcatacggaccgaagattggtagtcaaatcaacagtttgacggtaaaaccaatggatgaattgacggaagcggttaaaacggaaaatattcgcatcggaattatcacggttccggatacggaagcccaaaatgtagccgatcagcttattgaatcaggaattgaagcgatccttaattttgcaccaaccattctaaaaacaccgccgcatatccgcattcaccatgctgactttacaacggatctgcttagtttggcctattacttggagactggaaaggacgacgaggaagatgacaacaaatagatgggtaattcacaacggcaaatttgccgttaatgaaggcggcacaacatggaacgtggtccacggatacatggttgttgagaatgacaagattgtgcatattggtgagacattgccggatgaagacaaaaattgtaccaaagtggatggaaaaggactgttcttcctgccgggtctgatcaatacgcatggtcatgcagcgatgtcgttgctcagagggcacggagacgatcttgcattgcaagtatggttgcaggaaaaaatgtggccgatggaagcgaaaatgacttcagaagatgtatattggggaacttcgctatcagtgcttgaaatgttgaaaggcggaactacagctttcctggacatgtacgatcacatggatcaagttgccaaagttgtggagcaatccggcgttagagcggcactggcacgtggtgtaatcgggctgtgctcggaagaagaacaattgcggaagctggaggagtcggcagcgtttgcacgtgagtggaatggacaggcagatggtcgcattacaaccgtaatctcgccacacgccccatatacatgccctcctgactacatagagaagcttgtgcaggtcgcgaacgacctaaaccttccccttcatacacatatgtcggaaacgcttcgtgaagtcgagcagaacgtggctgattatggactgcgtcctgtggcacatctggagaaactgggctttttctctcgtccatccctggttgcacatgcggtgcatctgaatgacgaagagattgagattctggccggccatgatgtggctgtatcccataacccgggaagtaatctgaaactcgcttccggtgttgcgcgggtacctgcgttgctgaaagcaggagttaccgtgtcactcggaacagacggtccagcaagtaacaacaacctggatatgttcgaggaaatgagactggctgcattgattcacaaaggtgtatctggtgacccgacggcagtgccagcaggcgaagcgttattactcggaacgtcatacggtgccaaatccatcttcttgaataataccggagcacttcaggttggcatgaaggctgattttatcgcccttaacattgaacaggcacatttctatccacatacagacctgatctcacatacgatttactcggcttctgccaaagatgttgaacacgtatgggtggatggaaaacaagtagtgaaacatggcgaatgtctgacgctggatgaagaacgcattttgcgtgagtctcaattggcatttgatggtctgcttgctcgttaattgcaggacagcatcatagggaaaggaagttcggcttttgaagaaaaaaaagaagtggatatggatttcgctgcttgcactggttctgattctgtttggacttcagcgttattacgttcatgtcacgcaggaccaacgcaaggaagaagcgctcgccatacaagcagcacaggagcaactgggcattacatcctatgatgaattgcgtaagtacatctggggagacaaagaaggctctgacaacatctactggaccctgatcggcaaaaacaaggataaccaggatgttatggtctgggttaagttcgacgcaaacaatcaaccggttaagggtgcaaacgctgtacacagtgagctgctgcagaatggcatgtccgaagcgcagatacgcaatcgcttcagttctgaagttcctgccggtgagattaaacgaatcatgcccggagttgtgaatggaatatatgtgtggcaagtgtattataaagacggtacgcataaccactatcgcttttatcgttttagcaacggagaacaggtggacctggtctacacactcccgaacagctagaacaaatagagtgacataactagagaatgtaaagaaatgaaagaaccggcagacggatatccgactgaaccggttctttgtgttgcctgtaaatatatttgatttaaatagttaaaattaataatttattcatattttcgccttcgaaattgtatatacgatgtgatatactcagatatgtactcaaagttacattcaaaaacaaataatcctgtcgaaattctcgcaggagtcaatgtgcacatattcgtatataccaataagccagtaggttgggccaaattctgggaggggtaattcacttgaagctaaaagtattgcctattgctttaactgccgtcatttcagccgttgtgttgtttggaggttggtttgtatatcgtcaggtggctgtgcagaatccgattgaaaaaatggtaacccagtacgatggagtcaacgacgttcaattaactattaaccgcaatgacgtacaattgaaactggatctgcaacctgatgttgatttgggcagactggtacaatatattcacaaagaaggacagaccctgattggaacacgctcactaaagttggatgttgtggatcattccagtgaagcactggaaagttggtggggggatgcgatgttcaccgtagctcaggcgatggagaacaagcaatacaccgagattacaccaacgttgtccaagatggcgacgaatggaattaaggtaaatacagcgatggatgacaacaatgtatatgtcagtctcagagacggagatgccagcaagtttattattctgccgcgtgtgcccggtcagataggagtgtggcctaatgcctaagtggacaaaagaagttgccatcggattttttcccgtattgattattttccttgcttttactggtgttaatattgttccgatcctgattgcagcagtgcttgtcggagctttgctgttcatgatgcaaatgcgtggcgggattacagtaggcgctgcacaggaacgtaaacggaagaaaaaaggaccttccaagcttacttttgaagaaattggcggacaggacagtgccaagcaggaattgcgtgaagcgcttgactttctgatcaaacatgaagaaatccggaagttcgggattcgcccgttaaaagggatcttgctgacgggccctccagggacagggaaaacgttgatggccaaggctgctgcccattacaccgattctatttttgtagcagcatcgggtagtgagttcgtggaaatgtatgttggtgtgggtgccagcagaattcgggatttgttcaaggacgcgagaacccgtgccaccaaggaaaataaggaaaacgctattatctttatcgatgaaatcgatgtcatcggggggaaacgtgagggtggtcaacagcgtgaatatgatcagaccctcaatcagctcctgacggaaatggatggaatctattcttccgatacgccaagaattctggttatcgctgcaacgaaccgtaaagagatgctggatagtgccctgacgcgaccgggacgttttgaccgccacattcaagtggacttgcctgacaaaaagggcagaaagcatattctggaactgcatgcggtgaacaaacctctgttgaaggaagttaatctggagaaaacagcggaagaatcatatggtttctccggtgcacagctcgaaagtgtgatgaacgaagcagcaatatacgccatgagagacgggctgttaaacattgaacagcggcatttgtccctggctattgataaagtcatgatgggtgagaagacagaccgtgagtccagcgtggaagagaagaaaagggtcgccattcatgagttgggacatgccattatggctgaactcgttcgtccaggcagtgttagtcaggtggcacttagtccgcgtggtcaggcgctgggatatgtacgtcataacccgcaacaggaacagttcctctatacgaagcgctttctggaagagcagatcatgattgcactcggaggagcagctgcggaggaaatgtactacggtggtcgttccacgggttcacgcaatgactttgatcaggcaaccaatgttgtacagacgatgatggcttcggggttgacttcacttgggattgtgaacatggatatggtcacaaccgaggaactgatgcgagagaataaattaattctgcaagaactgatggagcagacaaagcggttacttgaagaacaacggacaattttcgacaattcactcgacattttgattcgtgaggaagttttgtctggcgaacaatttcgttgtcaatttcgtgacagtgcccttctaccagcataatttatttatgctggttatttttttttacatttcactcgtgctaagatattattatatgttgggtcgaaatttgtaattttcggcgaacagggtacaatagagaaatagagaaccgaaaggatggagcagaaccatgtttttcaaaaaaataggagttgtcggcggcggtacgatggggcaaggtatttcccagatgctcgcagccaaaggacttgatgtgcttctcgtggagcatacaacacaaaagctggatcatgcatatgacatgatcgaaaccaatctggataaacaactagagaaatgggcgattacaaaagcggagaagaaattgattctttcccgtattaccaaggtagctcatttagctgaacttggaacttgcgacatggtcattgagacaatttcagaggatctggatgcgaaaaaagcagtattcagccaactggaccaagtttgtccaagcaatgtcattcttgcaagtaatacatccacgctgagtttgaccgagcttgcaagctcgaccaaatacccagagcgtgttattggtatgcactttattcacccggtatcccgggttgatcttgtagagattattcgtggactgaaaacttcggatacaacattcgaagagaccagacgttttgttgaagaagtagcggacaaaaaaggagtcatgatttatgaatcccctggattcgtaacttctcgcttgatctgcctgctgattaacgaagcgttgcatgtattgcaagaaggtgttgcatctgctgaagatatcgatgatgcaatgcgtatcggatacaacttccaacatggaccactcgaaatggctgaccgtttcggattggattctgttgaagctgcactcgaaagaatgttccgtgaattcggagaattgaaatatcgtccttctacagtcctgaagaaaatggtgcgtgcaggacacctgggtgccaaaacaggcgaaggattcttcaagtacgacaaggatggtgaccgactgtgaaagtactcgtaattaatgcggggagttcctcgctcaaatatcaactgtataatatgactgacgaatctgtactggctaaagggttggtagaacggatcggaatggattcctccatcctgacacacaaaccgacaggccgtgaggatgttacagaagttagtgagattctggagcatacaacagcgatccgtaaagtcattgatattttgactcacaaagaaaatggtgtactggattctgtaagtgaaattcaagctgttggacaccgtgttgttcacggtggtgaagcatttaaagaatctgcattggtagatgatgctgccaaagctgaaattcgtcgtttgttcgacttggctccacttcataaccctgcagcaatgatgggtattcgtgcggctgaattaaatatgcctggtgtgccacaggttatggtctttgatacagcgttccatcagacgatgcctgaaaaagcttacctgtatgctattccgcgtgtactttacaaaaaatataaagtacgtcgctacggcgcacatggtacatcccatgatttcgtaagcaaggcagctgctgaatatctggatcgtccagtggaagatctgaaaattatcacttgtcacgtcggtaacggtggtagtgtaacagcagttaaaggtggcgtatccgtggatacttcgatgggtatgactccgcttgaaggactgatgatgggaacacgttctggtgaccttgacccagccatcgtaccttatgtaatgaacaaggaagaactgagcgtaagcgaagtgaactccatgttgaacaaacacagtggactgcttgcgatctccggaatcagcagtgacatgcgtgagattacggaaggtatggagaatggcgatgccaactccacgcttgcttttgaaatgtacgaataccgtctgcgtaaatacatcggctcatatgcagccgcaatgaacggtgtagacgtgatcgtctttacggctggtgtaggtgagaactccgttgtacttcgccaaaaagtatgtgagcaactcacttatctgggtgttgaactggatgaagcgctgaatgccattcgttccggcgaaccacgccggatcacaacagcgaattccaaagtggaagttctcgttgtgccaactaacgaagaattggtaattgcacgcgatacacaccgaatcgtattgaattctcagtaatctaactgtaaagtaaatatagaatgacaaggaagtgcagaggacaggcataagcctgcccgctgcattttcaaattcaggaaccaaggggagatatgggcatgaatacgaattgtgtaattcgtaatgtgaacgagcatgtgggcgaaaccgtaacaatcggtgcttggattaacaacaaacgttccagcggtaaaattcagtttttgcagctacgtgatggaaccggatatatccaaggggttgttgtgaaaagtgaagttagtgaagagatctggaacaatgccaagagcctgactcaagaaagctctttgtatgttacaggtattattcgtgaagaacctcgcagtgcgtccggttacgagatgactgttacaggggttgaaatcattcacctgactgaaaactatccaattacgcctaaagagcatggtgttgatttcttgatggaccatcgtcatctgtggcttcgttctacgaagcaacgtgctgttatggtgattcgtgcagagattattcgcgctgttcagcagttctttgatggtaacggattcacacaagttgatcctccgattttgacaccatcgtctgcggaaggaacaacgaacctgttccacatcaaatactttgatgaagatgcttatctgacacaaagtggtcaattgtatatggaagccgcagccatggcgctgggtaaggtatattcatttggtccaacattccgcgcagagaagtccaaaacacgtcgtcacttgattgagttctggatgattgagccggaaatggcatttgtagatcacgaggaaagtctgcgcgtacaagagaaatttatcgctcatgtcgttcaatccgtggtgaaaaactgccgtgcagaactggaatctatcggtcgtgacgtatccaaactcgaaggcatcgtagctccattcccgcgtattacgtatgatgaagcgattgaattcctgcatggacaaggctttgatattccttggggagaagacttcggtgcaccacacgaaacagcaattgctgagaagtacaatacacctgtctttatcacacattaccctgctgaaatcaaggctttctatatgaaaccagatccgaatcgtccagaagttgttctctgtgcggatatgattgcaccagaaggctacggagagattattggcggttcgcagcgtatcgatgatccggaattgatgcaacaacgttttgaggagcacaatctctcggatgaagcttaccaatggtatctggatttgcgtaaatacggatcggttcctcactccggtttcggtctgggattggagcggacggtagcatggatctgtggattggatcatgtacgtgaaacaatcgcattcccacgtatgctctatcgtctgtacccttaatgtttaaccgaggagcatctatggaagacaccacatccaaagcttggttggatggagcagcttatggcatgacttcgggtacagcccatctgccgtatgccttgttacgtttttatcaccagcttggcctatcagatgcagaagtgcttcttctgattcaactgctagggttccgtcaggcagagttcaatgagtttcccacgcttgaagagcttgcggcgcgcatgggacttgcacctgaaggtattgccagaatgttgcaacgtctgatgagggatgggtatattgctattgacgagcaccgtgacgaagaacgggacatccagtacgagcgatatgatttacatggattatatgccaagcttgcagcgtgcactgctgaagaagtagccgcattccgtgcggagcagcagagtagcaatacagcacgtcaagattcgaacagtgttcaaaaagaagaggaagaacggaacatgttctccatctttgaaaaagaatttggacgtccgctctctccaatggagtgtgagacgatatccggctggttggatcaggaccgttatcaagaggaattgattctaatggctctgaaggaagcggtttttgcaggcaaagtacatttcaggtatatcgatcgaattctgcttgagtggagtcgcaatcgtgtcaagaccgttcaagacgcgaaggcgtacacgcagcggtttcgtaatggtggacgttaattccagcgtaggcagggataagaaacaggccagaagtcattctgtgcctgtttttttttggattaaagattggatgagttatcagtaacatcaacctttcaggcaatgatttcattttgttttacaaaaatttgatagatcacgcaggggttaacgcacaagctatcgtctattgtattggagaggaggggagagttattgatgaagcgcgcgtaatcgaacaaatccgtcaaggagatacatcccagatgcgtactctgattgataaatatagccagcatgtataccatgtggcctattccgtactcaggaacgatcaggaagcacaggatgcagctcaggaggcgttcatacagatgtataagtctctccccgactaccgttctgaaggtttcaaaacgtggttaacccgaattgcctttcacaaagcgattgatgccaaacgcaagctgggcagacgaactgctgaggatctgggtggagaagaaaaaataatcaatatgcccggacgggatgaagacgttcttacccgtctcgttcgtgaagaacgtcaggataaacttcgcgaacgaattaatcagttgcctgctcagcatcgtgacattatcactgcgtattatctaagcgaaaaaaattatgagcagattgccagtgatgcacaggtggctgtgaagactgtggaatcccgcttgtatcgtgcccggcagtggattcgaaaaaattggaaggaggatgaatggcgtgagtaaacaggagaagtataccgctgcacaatggactgattatattgaaggccatatgagtgaaactcaagcgaaccaaatggaacagcttctgatggaagatccggatgcgatggacatctatctggaagcgcttggtatccatggagaactgcctccgctacatgacccaacagggtttgcggattcagtcatgcatcggattgagggcattcaatcacccaaggtacaacgcaaatcccgtgctgggcgaaaccggcgctggcttgatcataaagtgttccattacgcggtagcagcctgtttgacattgatcttcctctcgtctggactttttgacaaggtagcaccatatcacaagttccaggatggcgaccacagagggtcatttaccgagaaatggacggaggcagccacttcatggctggataacctcaagcctaaaccataaatagtttcgcattgcctgaaaagaaaggatgacgactgtgcactcagatcgtaacaaattactcgcatttctattaaacctgataccaggtctcggtttcatgtattggggacgggctgcaagggctgtgatctatccattgcttttcttcggaacagctgttggctcattcatgttagccatggtcactaatgaacaagatttattgattttcggtgcactttttgctgctttcttctgggggatcagcatgctggatatggttattgttctgctccgtacaccttctgcccgagaagcacattataggggatacggtgcgccttatggagctccttcacaccaaggagcagcctaccagggagcatacatggatcagcaaggtcctacggagcagatgaatgaagatgagctacatcaacatccaggtggtgaatatggccattctgaggggccctatggtcaagccatgtaccgaaaaggcagtgagggtgaacggttcttcaccattttgctctcatttgttccgggattgggccaccttcatctgggattgttgcatcgtggtttgtcgttcttgatggcgttctttggttcatttgccatgatggtttttgtggcctcgatcaccaatgaatccgtatttttaatgtttctactcattctgccagtaatatgggtatactgcatgtttgatgcggtgcaacatgtccaccgtaagcaggctggtgaggtgttgcaggatcggacattatttgaggaattggagatgggcagagtagccggacgacgtagcaaagtgcttgcaacgctgctatccgcttttccaggtgcaggtcatctctatctgggattgcagaaaagaggcatgcaattgatgttcctgttcctgggcagcatctatgttctggacctgcttcacttatcggtgtttctgttcatgattccgttgatctggttctacagcttctttgacgggctccagtgctccagtcgttatggacgcgaaccattggttgatcaacctatcttcaaggactgggcccgccatcagcgtctgattggattcgggattgccgcgctgggtctatattacctgacgatccgtcttgtcattccacagctgaatgagctcttccctaatgcatttatgacgtatgagatacgttcctatttaaacaccgtcatcgtatccttgctgctcatttttggcggtttgaaactgctgtttggcaagcaacgggggacgggtatccaaagtgctgctcaacgaaatgatgagggagcagacagtctctttttattcaaggatcgggatgatcgactgtagagtgacctaaagattatttacactgacactacgatgacagagcaaccttctaatctcttttatccaacaacaaaaaaacacgccgtggcctatgtatatcagcctctggcgtgtttttggttgtacagctttgatttcgaataaatgattgctatttcgtagcgcccttcagcagaagttgacggtacatcacttcgaacaggaattcgaacgcttccagatgacgtttcgcttcaaaagcatccttgccccacgcatatatgccgtggttacgcagcaaaattcctggtacgttggcatcaagtacacctggcaccaattcagcgatagatggaatatccgcaaagttaggcaggacaggtacacgaatctccgcattttcttcccaaatgttgaaagccttgatcaattcgattccttgaatcggtacgtgtccatctgctccaaagaattcactgatcaggttgttaaacacggtatgcacgtggaatacagcgccacaaccggtcaaacgatagatttcacagtgaatcaacgtttcggcacttggtttcaacgttgttgtctcaatcgctttgccgtgtttgtccacaaaaagaaagtcttccggtgtgcgaagggatttgtctttgcctgaggcggtaaccgcaaaataaaattgctccgggtcaaagtctcctacacgcatcgacagattgccacttgttccggggaaccagttacgactggcaaacaacgctttaatatcagccagttcttcaaggacctgacgtttgtgttccaatgtaatcttttcaaagcccatcgtttacagcactccttgtgtttgcttctgtttcatatcttcgatgatatcgtaaaaggtagcgaatggcacatggtccacacccagctcaatacatttgtccgttaaaatggagcgggagtaaacgagatcggcaattttggcaccctcaaaatctgtcagactgtctccaataaggattcgattgtattgttcttccgggaaggtacgaatgactgttgttttgcacatgccgcagccattctcacaaggaggctggcagggattcggccattcaatcttaatggtttcacccgagaagtcagctccgttgcaatagacatgatccagcgggatatgaaatggtgcgagtaacggttcaatgaaaaagtccatgccaccgctggtcacattgaattcgataccttcgctgcgaacgtagtcaagaaactcgctaaatccttcacggattcccgcttgtccaagcacaaattccactatttcatctttctgcgatgcaggcaacagagcaaacatggctccaacaccttcacgaagcgagattttttgctcaatcgtatctttcataatcgcttcaatgccatcaggtttgaaatgtttcatgatcgctacgatgttgtctgagagagtgatcgtaccgtcaaagtcacagaaaatgactgttttcttatcacttctcatcgttcgccaccccacaggtccaatgcgcttttcagctccggatgctcggttgcatattgcgcgagtggaatggaacgctgagctgcctcaatggcttgcaggaatgcacgtccgcctgcctcagtgcccataggatgtccatgaataccgccaccagcattaacgatgacatctgtaccaaagtcgcgcaaaatgagcggtacaaggcctggatggataccggctgaaggcactggcatactggttcgtacaggcagatcagctgtcagtaattgctccgtgatcgccatattttcttccttcggcatcgtaaccgaaccataaggagaagggaagagtaccagatcggcacccgcaagacgcatcaactgaccaagtacaaccgaagccgacatgccataatgtggtgaaggatacagtgctcctgcaagagcagggtgagccataattggcacattaatatcaggatcactgctgagttcatgcagcacatcatatccgtaggataatacgttgaataacagggcattggctcctgcaccaatagcgcgttcagcttgttgcttcagacgagatgtaggccctgtaagattggttgcatacagaagtttcttgccggtctcctggcgtgcctgttcggcagctttcatgcagacctcgactcttttttcgataggtgtcaatttattctcgaacagaatctcatcgtccttgatcaaatcaacgccaccaagagcctgacgaataaattgttcacgcagttcatccgcatttagcccaataactgacttaaagatactcattaacagtggacgatcatgtacaccaagcagatcacgaacaccattcagtccaaacttgggtcccgggaatgcactcaggaagccatccgagaaaccaagctttgtaagtttaattcggccatccattgagattttgccaaagaccgtcacgagcagggcagggatatcacggctgaagttaacatcaggatatccgatggtaatatcggcgtaacgctcacccgcagctattccttcagcttcatttacttctacgctgattacttcacccagatgtttctgcatcgcttcacgctgggcttgcggcaactccgtccagctacccacggtcatgccaatcgcgatagactgagccttcttgcgaaagtctgcatgatcatcatgcagacgatatgtggctgtgcacatgttattcattttaaatccccttccaaagcagctcccatctcccgtgagcgctctgcacagcggttgacggctgcgattacattttcaaagaaatctccttcgtccagcgtcttcagtgctgcctgggttgcccctcccggggatgtcacatcactacgaagcttcatcggttccaaaccggtttgttgtaccattcgtgatgcgccaagcaccgtctgaacagtgagatcacgagattgctggctggataagccaccacgaatacctgccgcaatcatggcctccattaaatagtatacataagcagggccgcttccggaaatcccagtgagcacttcgagtttatcttcaggtacgatggttacgataccaaccgcttcaaacatggtcatcaccgtactacgctgttcatccgtaatctccgcagagaaggcaagcccggttgcaccaagtccaatggtactggatgtgttcggcatggttctcgcgatcggttgtttacgaccaagcaaggactgcatcgtgcggattgataatccggcaatgacagatacgatcagttgatcaggtgataacagcggaccaagctcgcgcagcgctgcggcagcatctttgggtttcatacagagtacaatgaccggagtggaggcaaggtgatccaaggattgcgaggcagttccggtatgtacagcataacgggtgctgagctcctcctgacgtttctggttgctgcggttcagcatcgtaatatcctgaggacgaacgactaggcgggagatcagtccgcgcacgatggcttcagccatcgcgcctgctccgtggaaagtaatcttctgttgtagtaacgtctgttgctcttgactcatatttatcgttcctcctatataactgttgctgggatattattgacgaatctgtccattgcctgtaatacgatatttggttgacgtcagtgctggcagtcccatcggtccacgtgcatgcagtttctgggtactgattccgatttcggctccatagccaaattcaaatccgtcagtgaaacgcgtggacgcattgtgatagacggctgctgcatccacatcatgcataaagcactctgcatgggctgtatcccgggttacgatacactcggaatgtttggttccgtaatgtgcgatgtgctgcatcgcttcgtccaggttctcgaccacccggatatttaaaatatagtcgttgtactcggtcgcatagtcttcctcggttgcctcaagggcagaaggaacaagacggcgcaccgtgtcgcaacctttcaagaccacattggcctcacggaattgctcggcaagagcaggcagatgctcttccgcgtatgcggcatgcagcaacaacgtttccatggagttacatacggatggacgttgtgccttggcattgatggcaatttcggctgccataactggatcggctgattcatctacataggtatgacagatgcctgccccggtttcaataacaggtactgttgcattggcaaccacattacgaatgagagaagccccgccgcgtggaatgatgacgtccagcagtccgttcaacttgagcatttcatccacggaagcacgattcgcatcctcaaccagttgcaaagcatcagcaggcatgtctgtcgttgtgagtgcctgatgcagcacctccacaattttacgattggaggacagggcagaggagccgccgcgcagaagcactgcattacctgttttaagacataatccggctgcgtctacagttacattaggacgagcttcgtagatgatgccaatcaggccaatcggcactcttaatttttcaacatgtaatccgtttggacgggtaaatgtctctaacacttcgccgactggatcaggcagatctgcaatctgacgtaacccttcagcaatgcctgcgatccgctccttattaagtgcgagccgatccagcatggattctggcgtaccttgttctctgccgcgtgccagatcttcggcgtttgccgtaatgatggaatccgtctccttaatcaaagcatctgccatgacacgcagggccgtatttttctgttctgtattcaatcggttcagctgtggaaccgcggcttgggctttgctggctttttctctgacttcactcatcgtaattcctcctcatatatataaagttaaaattttaacctcatgttggactaaagattatttacacatacactacgatgacagaataaccttccaatcgctgttatccccagatttttttgattcccttttctaaagggaaaatccggcgataaaggcgaacgctccgctttttcaggttttttctgtcctctccgttacgtgtaaatgattagtttaacttaatatagcttcttgtttattttaacgtaatccattcgtctctatgaataacctcaagtctgtggatgctagcgagttgtttcatcacttcgccactgggaagtccggcaatgagtcgaagctggtcatcatcataattgacaataccgcgaccgagcaaagtttcgtccatgccaatgacctctacgacgtctccggcgtggaacgttcccagtacccgcttgacgcctacaggtagaagactgtggcccccatggacaagtgcttcttcagcaccatcatccacaacgacggttcccagcggagtagacatgaagccaagccactgctttttacgggataacgaagcgagtcgagtctcaaagtaagttcctttgcccgtgccatcaaccgccttctgcatatctccgggttctttcacacttcccacgaatacaggtacgcctccacgtgtagcaaccttggctgcatcaactttggatcgcattccgcctgtgccaaccgcagaacctgaaccaccggcaaaagcatagatctcagccgtgatttcggggatacggtcgtaacgcacggcagaaggatctttacgcggatctgcggtgtacaggccgttggtatcggtaagaatgatcagatgctgtgccttcaccaggtttgcaaccaatgcggacaacagatcgttatcaccaaacttcaattcgtccaccgacaccgtatcattctcattaaaaatcggaatcactcgctgtttgagcagttcctccacagtcatgcctgcattacccatgcgtttacgactgtgaaagtctgtacgagttaacagaatttgcgccgtagtaacgcggtgcgctgcaaaagcctgttgatatgcttgcatcagtaacgcctgcccaacggccgctgcggcttgtttctcatgtagcagtttggggcgctgagggtaaccgatctcccggaatccggccgctaccgctcctgaggtgaccagaagtacttcatggccttgatcagccaatgctgcaatttctccggcaaaaaaagtgatcgaactgcgatccagaccgccttcttccgttgtaagcgagctgcttccaatcttaactacaatacgtgaagtcatggtttcacttccttaaacatgattattaagtgcttctggagcaggctttagcgggtacaaaaaaaactcccgccctttagttaaaaaggacgaaagtttgttacttccgcggtaccacctttattgatgaataaatcatccggcttcatgccctgtaacagaaggcactgtcctgcacgtaacaggccgctcaggggtaggtttcagagaagagccgcggtaaattctttcagcagggtggaatttactctctgggcgcgactgatattctcttactggtcccgtcatcacgtttcgttcaatatttcttataacataccatggaaacttggcatatgcaaaggggttatcgtcctgtaaattacttgaataaattcagcttgccaatccgctcgacagcttcgcgtaatcggttttcatcacttaacagtcccgcgcgcacatagccttcgccatgcgaaccaaaaccaatacctggggctacggccaccttggcttctcgcagtaacaagtctgcaaatgaagcagaggtataaccggcaggtacaggtaaccagctgaaaaatgaacctgcgggtttcgaagcttgccagcctatcgaggaaagagagtcataaaatgcattgcgacgggattcgtagcgtgaaaccagtgaggcaacacattcctgtgagccagtaagtgcttccgttgccgcagcctgaattccaccgaagagactgacatagatatgatcttgaagcagattgattttagagacaatctctgcattgccaagcgcgaatccaacacgccatccagccatattgtacgttttggataacgtatagaactcaatgcccacttctttggcaccaggggcttgcaggaaacttacgggacgatgtccgtcgaatccaattgcaccgtaagcaaagtcgctggcaatgacgatttgattttgaatggcaaattcaaccgtatcttcgtagaacgaaaggggtgccgttgctgacgttgggttgttgggatagttcaggaacatcagcttggccttctcccgatcttcggctgtaacagcttcataatctggcaggaatgcgttggactccagcaaaggcataaatgacatgtttgctttggcgagtgcaacaccagaccagtaatccgggtagccgggatctggaacgagaacggtgtcgccggggtttagcaggacctgaggtaactgaaccaatccggttttgcctccgaacagaatggctacttcagtctcggggtccaaatcaacgttgtaatcttccttataacgtttggcgacggcttccttcaggaaagagtatcctctaaaaggggagtatttgtgatagaggggattctcagccgactcttgcagtgttttcacaatatgaggtggtgtaggtgtatccgggttcccctgacccagattgatcacgtcatgtccacttgcgatttcacgatttacattttgaacaagggtagcaaaaaattgcgttggaagctgtgtcatcacatcagaagtcggtatcttaaaagctgaacgagcagatgtatggtctgattgggtcattatattcatcactccggttattaataatggcaaatagttctcattaatttatcacgcaaatcccgagctgtatagagggaaatgcacttgaatatacagtacataggagcaaagagcggagtattgtacaaaattgaaagtactcatttagttttgtccattgagctgagagaagccatgttttatgataatatccgataatgataatcaatatcattaatttctagcacaacgcacatgatatagggggagaaatagaaatgaaaaagggcatacgaaatacgggagtattattaacgatcacatggttatccatcctgctactggcttgtggaaatcaggctgcaacacctgctgctggcgcagatgattccaaagcagccacagaaaccacagagacccaaactgcaacggaagagacgaacgagggcgagacccggatattcaaagactggactggccatgaagttgagattcctgtaaatccgaagcgagttatctatcatggagaagttacaggggatctgctcgcgcttggtgtagttcctgtcggcatacttcgtcaagagggaaccgtatttgatgatcaggttgctcaggcagaagatgtaggatttccgatcagtgtggaaaaggcgttagacctgaatcccgatctgattattttttccaacagtgacgaggctcaatatgatcagatcgcaaaggttgcacccacggttacatttgattcatttggtttaatagaagatcgcatgcgtatccttggcgatttgttgaataagaagcaagaagcggaggaatgggttacagctcatcaaaaagcgacggaagagatgtggacgcaacttcatgagaacggattaaaagaaggggagaccgcttcggtattcaccatgtatcccgggaatcgtctgtttgtcatggcaggtgcaggattgccacagttgttatacggaaaagacgggctgaagccaaccgcggaaatccagaaagtattggatgaagacatgggatttgtagagatttcgactgaaaaattatctgaatttgccggtgatcggatatttattctggatcctgtgaccgacgatgcgaaacaatccaccaaggaattgctggatagtacaatctggaagaacctgcctgcggtgaaagaaggaaaagtatatcgttttaatatcgtaaaagcttctagtgatgctctttcgagggagtggctgttacaagagctgccaaaacagatgaaccaataatggtgacgagctagtgaggcagcagtaacacctttgagtaatgcaattataaaaaaagtaaagggggccttcaacatttcgttgaacgctcttttttgctgattaaactcatatctggattattgactatcgctcgcttataatcagaccatacagaatgattgataattattctcattttagaaaaacgaggtgaaccgacatgcaggctttggatgccgatgggggagcgttgttcttttcagcattcatgtttcggctggatcatctggaacgtcgaattgaacgacctgaacaggtgatgctggaagttgcttgcgagaaacatgccttcctgatctgtgaagaaggggatgggcgtttatatattgggcatgaacagtttccgtttactacgggatgtgtttatccgctttctccgggagaggggtaccagattgaacatcgtaataactcggaattgaaatatatcataatggcttttgatgttattcatgtgttgacgggtgatcccgaactctttacccgccctgtatttgagcacagaaaccaattgaatggttatccctatgctccgttaagtgggctgctggagcagatgtatgtcattcggaattataaaacagatgctgaatacagccatctgaatgcacagttccaaaaatggatggagatgatcattacccgatacacttctccaaagacggaacagagtatggaagcaagactacacagtacgattcagtatgtagacgaccattatgctgaagaaatcactgtacagaaactggcacgtcttgcggagatcagacctgtacaatatacaacccttttcagacaactcacgggtcacaagccgctcgattatgtgaatcatgttcgcattaaacatgccaaggactggcttcgcaaatcagatgaaccacttcgggatatagcgagccgtgtggggtttaaggatgagtattatttcagcaggcgttttcgccaaatgaccggattatctcctcgtcaatatgacagatcgattcagcagcagagattggtacaggattggttgggtcatgatgtgaatattccagtaaatcctgaccgaattatgtattacggagattccgctggggatctgctgatgctgggtattcagttgctggaagatcggacatatgacgcggtcgctccggttaatgtggaagccgctgttatcatgaagccggatttgattatttttgatagcagtaatgaacaacagtatgaacaactttaccggattgcaccgacgcttgcttacaattcacatgccacgttggaagaacgaatgcgcagattgggcagctggtttggcagacaaccgcaggctgaacaatggctaacctcctatgcggagcgtactgagcagatgtgggcgaagatccatactgtaattgaagagggggaaacggcatccgtatttacataccatcggggtgcacgattatttgttatgggcaatatcggtctggcgcctatgttatatcatccaatgggattcaggccagttaccaaagtgaaggaagcacttgcggcaggcagagcctataaggaaatttcggctgaagcggtacgtcagtacgcgggagatcatgtgtttgttatgctgcctgaggaagttgtggcaagacaggctacagagatgctgatgaaaagtcccagttggcaggcccttccggctgtgcagaatggacgggtatatcctgtggaggagtcaacatggaatgtgggtgatgcgctcacgagtgatcgattgttgaccctgctccctgagttgttgtgtgcaagttcataacaaaaacaggcttgcagtcctcaggaggatcaagctatgatagcaggtattacggttcagaggagtgcttgtcatgacagaaaaacaacagggagaaatgcgtgtagccctgattcagggcgatattcagctcggagaccctgaggccaatcataaacatatgcagatgttgcttaagcgtgcggtagaacaatatccggatctggggctggctgtgttacctgagatgtggaataccggatacgctttgactcaaattcatgaactcgctgacccggaaggccagaaatctcgggaatggctgtctgcttttgcacaaaaacatcaaatttccatcgttggcggttcaattgccgagaaacgggatggtcaaatatacaatacaatgtacgcttatgatcgtgaaggaaaacaggtaacacgatacgataaattacatttgttccgtctgatggacgaggagaaatatttacagcctggtgcggaacctgaaatttttgaattgcagaacggtcttacagcgggtgcttcgatctgttatgacatccggttcccggagcttgcccgcacccttgctttgaatggtgccaaggcattgattgtacccgccgaatggccgaaacctcgtctgcaccactggcgtacgttgcttaccgcacgagcgattgagaatcagatgtatgtgatcgcatgtaatcgtgtaggtaaagggggagagaccgaatttttcggacattccctcatcattgatccttggggtgagattgtggctgaaggtggcgaaggggaagagatcgtgaccggaattattcgtccatctctggtagatgaggttcgcggacgtattcccgtatttgaagaccgtcgacctggcgtttattttggcggaaaataaaaactgaaataaaattcttcagaaaaagtgtttattcttccaggacgcgggtaatgataactatcccgttaccaaggagatgatcaatcaatggacaaccatgtgaaagatacgctcaggagactggaacaggataacacaagggaagatcacttaagggcattcttagagaatggagcaggagggctatcaccccctgattcaactgttcaggacgaaggccgtgtaatgaatcagcaaaacaggctgacaagcgatcgtaatttgcgtaaataaaccgccagacatgaagttttcttatgtacgtttctacgttaacattataaattagcattgtagctaaacaacttaacaagcaacattgtactgtaaccagttactgtgattgcaatgtaagaactctatcctgcggatgcgggaaacgagtatatgacaaaggcttggcccataagggtcaagcctttgttttgtttcagtatgaaatgtacccataccaatagaaaaaaatttttagtctccctttgacagttcggccaccgtttcttgaaacgtatggatgaatgcttcggctgccttcgacagcactctgccttgacgataagcgacaactagtgttctgctgggagtaggctcagcaagtggcacatacacaggcacgaactcactgcgcggcgcacgggcaataaagcgtggaaccagggtaatgcccatacctgtggcgaccagcgactgaacggtttcaatattggtgctttcaaacacaacttggggatcaaaaccggcctgctcacagagatcaaatgtaagtttgcggaaaccctgtccttttttcaatacaacaaagggttcatcacgaagctcttcaattcgcacaggaagcggatgctccggatctgccctgcgtgccaaagggtgattcgggggaacggccagatcaatcttttcctctccaatggcaacgtaggcgagacttggctcttgtaaaggaagagataacagactgagatctgctttgccgcttgctgtcaatttctcaagcgtaagcccggagtcttccaataaggtaacctcaatctcgggataagcttgttgaaacgcaggaagcacatgtgggagaaggtgtgatcccgtgatcggcatactgcctacaacgactttacctttgcgaagctgggagatatctgacatttcctgacgcaatagctccacggcatctacaatcttctgggcttgctcgacaaacgtaacacccgcatgggttaactccacggtactggtattacgctgaaacagcagtacacccaattctttttccaatttggataattgctggcttaatgaaggttgggcaatatgcagcttctctgctgcccgggagaaattgcgttcggccgcaatttgcagcgtatattgaagttgtctgaattccatcgtcatcggtcattcctttcgttatgccatcattatatcattacagatgaagaaatcattaatttcgcttaaccgcttgcactccatcagaagtgttgctatactaattttgaaaacgcttaataagaaccacttacccgggtaaaacaaaatcaacgttttcagtgtaccagtttcaagtgttagcacagaaccatttcaaatgttcatattctttttcgttcatataattgaataacattcatccaacgatggcgtgttactgttcggcaggcaagacctagattgggtgggaagagtttctcttttcctaccctttttaggtctttttttgttcccatcaagaaacggaggtgcaccatgaatcacaaacaattagcccaatcgattatggagctggtcggtggcaatgataatatcaacacgttaattcattgctctaccaggctcagacttaccctgaagaatccggatatggcgaagacccaagaaattaagggccttgatggtgttattggcgcagtgaatagcggcggacaatatcaggttattatcggtaatgacgtcgcgtacgtctacaatgaacttgccaagatgatggatactcggcaatcaaacgagattcaggagaaacaaaaagcggattatagccccaaaggtctgtttaatacttttgccagtgtcattgcaggcattttccaacctattatcccagccattgctgcctcgggcatgcttaaggcacttttgctactggcgaccgtgaccggcctgatgtcaaaagagagccagacatataccgttttgagtgtcatgtctgatgctgccttttactttcttccgattctactggcttattccagtgcaaatagatttaaaaccaacccctttgttgccgttctgtttggtggaatcatgttacacccgaatatgattggtctgcttggcggtgaagatccggtttcctttattggcatacctgttgcatccgttcaatatgcgacatccgtggtaccgattattttaacggtctggttcatgtcttacattgaaaagttcgcggacaagatctcaccaggaccggtcaaaattttccttaaacctttgattgttattctcattgttgctccagttgccctgattgtacttggacctctggggatgtatctcggaacgggaatgtccaacctgatctattggattcaggataagattggatggttgaccgttgtcattatggctatactgatgcctctgattgtcatgttcggtatgcataaagtattttatcccattattttcgcagccttggcttcacctggatatgaaacactggtgctggtcacgatgctggcatccaatatggcgcagggagcaggcgcactggcggtgtcattcaaaaccaaagacatcaagctgaaacaagtcgctttgtctgcaggaatttcaggtgtattcggtatcacggaacctgctctgtacggtgtacatttaaggctcaagaaaacgctgtttgcctgcatgatcggcgccggagtcgctgggttgttcgcaggtattgtgaatctcaaggcatatgctgccgtgggtccggggattgcatctatgcctatgtttatcagtgaagatcatatgaatattatctatgcgatcattaccatgctgatctctgccattgtcgcgtttgtcgctgtatatgtcattggatttcaggatgttgttccaacagcagtgtcgatagcaggcagtcctacaaacaaagcgagaggcgaatctgaaatccagccatccaaagggatcaaatcgaaaaagatcgtttttgctccattggaaggtaaagttctgccattaagagaggtgaaggacgaggccttctcgcaagaagctatgggacaaggtatggccattcagccaagtgttggcaaggtgtttgccccgtttgatggtaccgttgagacggtgttccgtaccaaacattccatcggtctgagatcggtagaaggtgtagaaattctgattcatgtcggattggatacggtgaaactgaaaggccagcattttgatgtaaaagtgaatgaaggagaacagatctctcatggtcaactcctgattgaatttgatcttgaagctatacaagcggcaggttatgacacgacgacccctgtaattgtgaccaattcatcagattatctggagatactgggcaatgaaactgcggcgacaacaggaccggggaaaccattaattacggtgttataactcgctgaaatatgaatgaaaggcaggcagcctgatatggaagtcataaaaatactgaattcgagcattgttcttgccagacgtgttgaggatgacaaggaaattattgtgatgggaaagggcatcggctacaggagcaaaccgggagatgtcgtgggcgaggatgagatcgagaagatctatgtccttgaaaatgaaacgatctcttcggatctcaccgccctgatgaaggaaacgccaaaagaatatctgattctggctgatgaaatcatctctcacgccaaacatacattgtcccgccatctgagtgatcatctctatgtcgccttaacagatcacctgtatatggccatgaagcgattcaaggacaatatgacgatccagaaccgaatgttgtgggaagtgaaaaagttctatccgcaggagttcagtatcgggttgcatggtctgtctctcattcaaaaacagcttggactctccctgcctgaagaggaagcggcgaatattgcctttcatctcgttaatgcgcagcagaatgatgacaatatgaatcaggtcatgatgatgaccaataccgtcaaggatgtactcaatattatcaaaattcactatcacgtggagctggatacacacagcatcaactattcacgctttttgacccatttgcagtttttcattcaacggctttttgaacataaaacgttaaacacgcaggatcatgagctctttgagcagatcgcgaataaatatccgcaggaggaagcctgcgtactgctaatcaaggattatattgaagctcggtttgaacatacgatctccaatgaagagatgatgtatttgattattcatatcaatcgggtcatgagtcgcaattgagcaagaatcaaagagttacagagataatccaaggaggaatacacaatgaccaatacaacaagaacgtttccagaagattttctatggggaggagcgattgctgccaatcaggcagaaggagcgtggaatgtggatggcaaaggtctgtctacagccgacattgctatctatcgaaaaggtgtagccaagagtgagtataaaaagcataatgcgatcaatgaagagcaaatcaaaactgcgatggagtctagctcggacagagaatatccgaaacgcagaggcattgatttttaccaccgctatgaggaggatctggccctgtttggggagatgggtctcaaaacgttgcgcttatctattgcttggacccgaattttcccgaatggcaacgaaacagagccgaatgaagccggtttgcagttctatgaccgcgttattgatggcatgctgaaacaagggattgaaccattaattacgttgtcgcattatgagatgccgatgtatctggtgaatcaccatggtggatggacggatcggaaagttgtcgagtattttgttcacttttgtaaaaccgtgttcacccgttataaggacaaagtgaagtattggattacatttaatgaaattgacagcattgttcgtcatccgtttacgagtggtggtattgtgccggagcgtttcgaaaatgtggagcaggctgtatatcaggggttacaccatcaatttgtagcgagtgcgctcgcagtgaaatactgtcatgagatcattcccggttcccagattggatgtatgcttaccaaactgacaacgtacgctcatacatgtaatcccgaagacgtacttgttgcttcccgggataatcaattcaatcttatgtttacggacgtacaggtgcgtggagcgtatccgtactttacgaagagattttttgccgaaaaagggattaacctggatatgcttgagggggatgaagagattcttaaagtacacactgtggactttatctcattcagttattatatgtccctggtatcaagtgtggatggcgaccgattggagcaggtgagtggcaatacaactggaggggtgaagaacccgtatctgcaaacgaatgattggggctggcagattgacccggtaggtctgcgcatctcactgaatgaactgtatagtcgttacgaggtgcctttgtttatcgttgaaaatggaattggggcggtagacacgattgaagcggatggtagcattcaggatgattatcgtattgattatttccgctctcacattgaacagatgcatgaagcgattctggacggtgtcgaactactcggctataccagttggggagtaattgatctgattagttattcttcttcagagatggagaaacgatatggctttatttatgtagatcaggataatgaaggcaatggaacactggagagaaaacgtaagaagagtttctattggtacaaagatgtgattgcgaataacggtttgtaatacagtagtcggacaagtactctatagaaggcgttgatattataattttcattttataacagaaactagcaaagcagctctggattcagggctgtttttttatgttctagataaaaagcattgacagcgaagcagcggaaacgtagtataagacttatctgataatgataattgttatcaattgaaacctctgcgatgagcagtggtttatttgtctttcttacattataggttaaacctattacatctatagatattatatcttggaacaatgaaggacggggtgatatatttatgtcattcaagagcttcactttttaaagaaaacagaggctcttccaaggaccgaacttataatgaggtgaaaatgatgagtaaaaaaacgatgtttgagaaaatttgggaaaatcacgtaattcatcaagaagaaggcaaaccaagcattctgtatatcgatctgcatctggtgcacgaagtaacttctccacaggcatttgaaggtcttcgtctgagcggacgtaaagttcgtcgccctgaactgacatttgcaacaatggaccacaacgttccaacgaaagaccgtttcaacattacagatcctatctccaaacaacaaattgatacactttcgcaaaactgtcgtgatttcggcgtgaaattgtatgatctggacacgattgatcaaggcgttgtacacgttatgggacctgaactgggtctgactcacccgggcaaaacgattgtatgtggtgacagtcatacgtccacacacggtgcgtttggcgcactggcattcggaatcggaacaagtgaagttgagcatgttatggcaactcaatgtttgcaacaagcaaaagccaaaacgatggaagttcgttttgtcggcaaacgtaacccgggtgtaaccgcaaaagacatgatcctcgcagtcatcgccaaatacggtacagactttgcaacaggttatgttattgagtacacaggcgaatccatccgtgagttgagcatggaagagcgtatgacggtctgcaacatgtccatcgaaggtggagcaagagcaggattgatcgctccggatgaaacaacatttgaatatctgcgtggacgtgaatacgtaccagcggatgccaaattcgacgaagctgtagcaggttggaaacagcttgtaaccgatgaaggtgccgagttcgaccatatggttgaaatcgatgtggagacattgattccgcaagtaacttggggaacaagccctggcatgggaaccgacatttcttcgaaagttcctgttccggctgaactgcctacagaaaacgaacgtaaagcggctgaaaaagcgcttgaatatatgggacttgaaccgggaacaccaatcgccgagattccaattgattatgtatttattggttcttgcaccaacggacggatcgaagatctgcgtgcagcagcacaagtggctaaaggtcacacggtatccagtcaggttacagcaattgttgtaccaggctcaggacgtgttaaaattcaggctgaacaagaaggtttggataaaatctttacggaagctggatttgaatggcgtgatgcgggatgcagtatgtgtctggcaatgaacccggatgtattgaagccaggtcaacgttgtgcttcgacgtccaaccgtaactttgaaggacgccaaggacgcggaggacgtacgcatctggtatctccggcaatggcagcagcagcagcggttaagggccactttgtggacgtacgggactggaatttcaaaacagaagcagcgatctaatctataacagacagaagggagaacgtttaatatggaagaattcaaaacattacaaggcatcgttgcaccggtagaccgggtcaatgtagatacagacgcaatcattccaaaacagttcctgaaacggattgaacgtaccggatttggacaatttttgttctatgaatggcgtttcgatgaagagggcaacaataatgcttccttcgaaatgaacaaacctcgttatgaaggggcatccatcctgatctcacgtgccaactttggctgtggatcttcccgtgagcatgcgccatgggcgattttggactatggattccgttgtgtcatcgctccctcttatgcagacatcttctataataactgctttaagaacggaatcttgccaatcaagttgtcagaagagcaagttgaagacttgttccaacgtacagcgacacatgaaggctatgagatgaatgtaaatctggaaaacaaaacgattactgatgcatacggactgcatatcgattttgatctggatgagcaccgtcgtcaattcctgttgcaaggattggatgatatcggtctgactcttcaacatgatgatgaaatcgctgcttacgaacaacgccacgcggcaaaactgttcggttaatcgttaaagtatcgcatagcaaaaagcttctgcctcgcccaagggaccttgttcccatcggtgagacagaagctttttgtagtttcagaagtaaattagcttaataagtcagctatacatagaactcctgatttttcttgaccgaatacttcaacagatactataacagtcgactaaatagaggaacctaaaaatcgattactgaggtagctccaaaaggtcgctttttgtattttgaaaatagacatagatataacaagccaaatgcacgaaattcacaagtgaccataccataagccatatgattggagttgatagggtagtccagatgccaaaccaaggcagcacacgtcctccgccgataaacgtaaccaagtgggacagaaataagagaattagaaccgggatcagtcttccgaccgtgatcagaatcaatttgctgatcgttaggcggtggtagttccgaagtatacgagaatagccgtagatgccccatgcaagcgtagcgatgatcagcgcaatcatgatcatttccatattccgaccgtttacaaacgaggtttggggttcctgccccctcataatatccgctattccatcaataaatgccgagtaattcacataagcgtttataccagaattaaacattacggcaatgcccatttgctcgttcaaataaacctgttcttcggacttgtaggtccagaaaatgccgctgtgggagatcgtttggccgttagacgcatcttggtttgcaagccagcccatgccgtacggaccgatcgctcctgaggcatgatattgtttcatcagcacaggggaaacgaggcggccattatattgggaaagcatccatagggacatgtcctctgcggttgaaacgatgccggcggggccctcaatgaaccaaagcggttcggattgacttatagcgcgtcccaagctcaggtaatgtcctagcgggatagtattattctcatagaattgctgcgttgtactgacactgaaggtatgattcattcctaacggttcaaaaatatgttttttcagataatccgaaaagcgctctccgctaacactttccacgaggttcgccagaagcacgtaattgggattatgatagctgtaggctgttccggggatatgggcaagttgaaccgtgtttaataattggttcgcttcagccagtgattggaattgcggagtctttttcatatcgggattaatcttgtcattgagaccactcgtctgattcagtaaatgacggaccgtgatatcaagaacgtgggggtcctgtggagaaagctctggaaaataggaagcgtaagtcgcatccaagtcgatctgacccttgtccaccagctgcagaacggctaatgcagtaaaggacttgcttagtgaagcaatgggaaaaggggtgttgcccgtaaccttctggccgtccgccaatgtcccgtagccttttgcgtaaaagacctcatcgttattggcaatcgccagtgaagcagccttaatgtaattggccttcatgctccgattcatatattcgtcgatctcctgcagcacttctgtcctgtctctggcttcattggcggataagggggacgcccacgcggtacataacaacaaacagctaattgtgatatacattctttttttcagttttagcatgataacactccttgaattcaagataaggagatgttatcagatcattttcaactatttatcaacttgggtccgaatacttgccgtgacgcttccacctccgttaggaccgtttgcaatctgaagactaccttcatgtttttcgcaaaacaccttgcaaacgtaaaggcccagcccgcgatgttcgcttgcatcccatacttcgcctcggtaaaaagggagcatagccttactcagggcttcctcagagaaaccagaaccgtcctctgagacggtaatcttcataatgcctccctgaacgtcatagtgaacgttcacttgactggctgcgtatctcgccccattagccactatattctcgaaaatctgcatgacgagatagggatctacatgtactgaggcattatcatattccacggatgagacgaaacgaataccgaactgtttcgcgatttgttcagcgctgccatccagcaaagccgtcaatgagatcgtatccatcgattggaagttcaacggcacatcctccagcctctgaatggagttcatggcctctgcataactctccagacgcaagatgtgaaggttcatagtatggatcaagtccaacaccttttcttccgacaacttcttctcaggaagataggtggagagaagctcggcgtttccttttaacacggacaggggtgttctcagatcatgggcaaaaatagcattgatctgcttgcgctcttcaaccgaacgccaaagtgtcttaaggtttttttccaattgtgagcgcatgttttcaaatagcgcgatcagctcgcccatctcatcctggctgtcataggaaatgcggaagtctagatcgttggccgaaatgttcttggatgctcgttttaatagctccagcggacgttttagcttccatctgtaaaatagaacggccatggtgacaataccagtcgctacggtgagcagaaccgccgtgacgagggagggcatcacccaatccgtttctccgaaacgcagccgcaggttctccgcccaagcaaactccatagttataacggcaagcacggcaatgagtgtgaccacacacaacagcataaaagattgtagcaaggacaatcgctttaaaaacaggagtctagtcatgaacttggccatttgtaccctactccccaaacggtctcgatttgattatcacagccgtattcctttaatttgtagcgaattcgccggatatgctctgcgatgacgttactgtcaccttgctcgtccatgccccaaatcttttcgtatatgcgttcctttccaaacaccatatcaggatgcgtggacagcaattcgacaatatcaaactcttttttgggcagtgaaattcgcttatccaggtagtagagctccctggccgtataatcaatgaccaattcattgttaaaccttaccgaagatttagtttggattcgttgttccctgcgtatatgtgcttcgaccctggcgcccaactcgcgaatgctgaaaggtttcaggatatagtcatcgcctccggcacgaaatcctgctattttatcagcatcttcgattcgagccgttaagaataagatcgggcaagagacaaagtcgcgaattttttcacataattgaaggccgttctgttcaggcatgttgatatctaacaaaacgagatcgggttgtttttccactttccgcagcgcttccctgctgtccttggccgtcatcacggaatatccgttaatttcaaaataatcagtcagtagctttcgaagatctgcttcatcgtccacgatcagtattttaggcatcaagtctcaatctcctgtattcaagtatttgaactcagcatagcaaaaatggatgaggaatgtaatttccatatgattttgggaactggacgaatggagaaagtaacctttttgccactcagtttccgactaaatatgacaacgttgtaaccggatgatcagacaatatctgataaactgattagtagattatggaaggttacatattgtcattgatgttacgctgcagagaatcaggtcggatgttcaaaagacaaaaagaatggtggatgagttatgaaaaaatggtcggcagcagtcgtttttcttctgttcctatgtttattcccagtcatggcccatgcagacaccactccctcgattgtactcgacggtgtaaccattaaccagcagacgggtgcacctgcagagaatatcgggaaaacggtcatggttccaattcgaattgtatccgagaacctgggttataaggtgaagtgggagaaggaaactcagtcagtccaggttcaaaaaggaaacagcatgattcaaatgacggctggcaaagatgcagctacagtgaatggaaacgtggtgaacttggattcgcccccactgatcaaacagggaactacgcttgttccgttacgctttgttggggaaggcatgggtctgcgtgttggctgggacaatggaaccaagacagtaagcctatatagtattcctcccgtagttgaaacggaaggtgacagtgaccccgtcgaggcacctgtcccggatggtttgacagagcttcaaggcatcagcttcagcggagatcgcttgattgtagcaacaaacggtaatattagccccaaagtatccagtattggtgggccagaccgaattattgttgatctgccttcagcgacattttctgaggaattcattcagggacaagcctctaacccggatgggagtggacagattctcgttacggattcatccatagtttccaaagttcggtatgccatgttcagtaaatcgccttctaccgtgcgtgtcgttctggatctgaatcagacggctacagccaaatggtctgttggagataacaatgtcttgctcgttgacctgacagccacgagtggagaaccgacaagccaaccggcagtacctaccaatgatggcaaaacgattgtggtcattgatccgggacatggtggtcgtcaatcgggtgcagtgagtttgtcaggagcttatgagaaggatttcaatctggctgtaggactgaaggtacagacaacccttcaaaaatactcaaatattcaaacggtcattacacgccaggatgatacagaactttcgctcaaacagcgtgtggatattgctgaattgaatcaggcagatgtttttgtatccattcatggaaacaaattcactacaccggtaccaaacggcattgaaacgctctacagtcgtaaagaaagcaaaactttggctgacactcttcacaaatatgtgttaccggtaacaggactcaaggatcgtggggttaaaacggctagtctgcatgtgacgcgtgaaacaaccatgcctgctgtgttacttgaacttggttttttaagtaaccctacagatgaagcagtcatgctcacggaagaataccaggacaaatgtgcacaggcgattgtggacggaattgttgaatttttgggactgtaaattgaattgtgcgcaaatatgaaggttagggtatcacgttgtttagagatgtatatttgataaataaggaaaaaagaagacattaaaatgtaaaaaaagcttgatctgacaacgttttttttctgttatgttggaatatattcgcaacttttgagagcgaggggcgtctaataggtgtctggtaatgcccaagcggtcagtcggagttggaaaatgacaacatgcggcaaaaaaatatgagaatggtaggggtgaaggatgaagaagttcggttttttggtactgttatttgtctttgggctcgtattcccgggctatagtcacgcagcaacagacacgaaaattatcctagacggaaaagaaatcgtacagccatcggatacaaaagcggaaattatcaatagcaaggtgatggttccgatccgggttgtgtccgaaaatcttggatatagcgtggagtggaagcagcaaacgcaaacagtgactattagcaaagacaacactgccatgcagatgattgttggacagaagacggcaacggtgaacggcagtaacgtaaacttggatgccccgccactcgtgaaaaatggtactacgctcgtacctctccgatttattggtgaggaaatgggtcttaaggtgggttggaacaataccacgaagacggtaacattagttacccagaattcaggttccggaaacgggacaaccacacctccgaactctggcaatgaaggcggaggatcggatcaagaaggtcttgtactggtgaacggcatcagctttagcgacaaccgcttcatgattgcaacaagcggaagtacgaagccgaacgtcttcacgatgacaggaccagatcgaatcgttatagacttgccgaataccgcatttgctgattcgttcagtgaaggacaggctctagacagcaaccagaatggacaactcgtcgttagcggttatccggatgtgtcgaagattcgttactcgttatacagcaacagtccatctacaattcgttttgtaatcgatctgtccagttcaaaagggtacagtgtgcaaaatgattccggactggttatgattaacctcgacaatcaaagtggtacacctgctcctccagttggtaataatggcaaaaaagttgtcgttatcgacgcaggtcacggagatcatgatcctggggcaatcggtgtaactggtaaacgcgaaaaagacttcaatttggcaatggctctgaaagtggaagccttgttgaaaaaagaatccaaaattgacgttgtgttaacgcgcagcgatgatacatttttggcattgaaagaacgtgtgaagattgcgcaagacataaaagcggatatcttcatctccattcatgctaacagtggccctgctgctgcgaacggtgtagagacattctatacacgctccaacagcaaagcacttgctacagtgatgcacaagtatcttttacagtcttccggactgaaagatcgtggagtgaaaacggcaagtctccatgtgacccgtgaaacgacaatgccagcagttctgctggaaggtggattccttagcaataagagcgacgaagcagccctgttcactgagagtttccagaacagtgttgccaaagggattgttgcaggaatcaaggagtatctgggaattaaataagggacaagcccttatgttgaggaggcggagttagaatgaacaagaaaatatggattgcagccttgctggtaacggttatggcagttgctgctggatgtggaagcaagccaacagctgctccgaatcagacgcaaggcgcaggaactgaaaacaatgtgaccgaggttgaaggtgaaacaattaccgaaccggtaactgctgagcctgaagagaatacaacgcctacagaatccacggaggaaggcagctcagaggaagcgactacaactactccgccaagcgaaacgtctacggagaagccggcaacttccgaaagtaatgaaaagaaaacgatcactgtattctatacggatgaagaagaactggagttgcacaaagcttcggcagagatttcatacgcatcggatgatgccaaatataaagctgcctttgaatcactgcaacagagcaaagacgctaaacttgttccgctgtggtctaaagaaattgaattgaagtctgttcagttcaaggatggcgctcttgcgctggatattcatatgccagatacggcacgtcttggagcaggtggagaatcttatgcgctggatgctctaaaacaaacgttcttccagtttgatgaagtaaaatcacttgatttactggtggatggtcagcagacggagagtctgatgggccatgtggatcttgaacatccaatgacaagatccgaataggcggtacagcatactgttgtaccgtgaatccacggaatatgggtcgttttacatgagagaggggaatcataggtgacttttaaatataaccatacatcacactctaaaaaagtagtatcagcagtgcttgcaggcatgatggcccttagcgccggcggagctgccatggcagcagaatcaacagaaacggggcagggtcagactgctgcaataacaaatacggctgcaccaactggtttgttcagtgacatcaaggtcggatactgggctgagaaacatgtgtacaaactggcatatcaaggtattcttctcggtaacaacggcctgttccgtccaggagacgcggtaacacagcaagaagctgtaacgatggcaattcgttttatgaatcaagagggccagttgaataccgacacggctgcggcattaccgacaaacatggaagtgggaaattatttcaagccatatgtcgcgctggcacttcaactgggactgattgacaaaacggaagaatcaacggtggatgtatccaagacctcctggggtcaaaaaccagcttcacgggaatggattaccaaattgttaatccgttcattggacaaggatgctgaagcaaaggcacaaaacaatcaatctaccggatttgctgataatgcaagtatttccgaaagtggtaaaggttatgtcaatctggctgttagcctggatctggccaaaggtgtggaaggcaacaaattcaatccaagtggttccgtaacccgtgctcaactggctaccttcttcagtcgtggtgaatcgttaacggatacaacgtacccgaacacatccacgggttatgtgacaggattgaaagatgggcagatcacgctggttgtggacggcaaagccgttaacttcgcagtgaacagcagtacgccttactttacgaaagacagtgaaactcgtgcttccgccacagatgtgaagctgtatacaaaagttatggttgtaggttctgcaggtggggcttcctatgtagaagttgttgatgctacaccgcaggtggaaagtgttgaaggtacatttgcacgttcattgtctggtaataaaattggtatctttgtgggcgagaattacgaaacgtacagttatgatgaggcaactgcattcatcgatcagaatggtaatgcaatcaaactgtccgatattacggcagatagcatcatcgaagtacagcgtgagacgttctcgactgacaaaaaaacagttgctattcgtgtgaaatccggcattgttaacaagagtgacaatggcgtaattgctgaagtatccacttctggcaaaacgatcaaacttgtcaatgcagcgggtgctacagaacagtttgcatacaatgacaatctgcttatcacatatcaaaaccgtatcatgtcagtggctgatctcaaagccggcagtgccgtgaaatacaccgtaaaggacagcgttttgcaaactattacattgtctcaaggtgtggagcaatctgtgcgcggaacattggttgagatcggtggtaaccagtccacgttaacgttcaaacgtgaagggggttcccttgaggcgaaactgctgactgaaaagccggaagttattatcaatggcattcaggatgcaacgctgaatgatctcatcacggatgcaacgaacggggatcaggtggagttgacattgaactctgacgaccaggtaacgcgtattcaggtgattggacgtcaaatggaacctatgaacggagtaacggttgtatcttacaacagcaaaacaaaggtacttaccgtgttggacaacaacaaaaaaccgtttgtatttacattggatgagaaaaccaaactggattacaatacgaccaaacctacactcgctggtctggagtcgattttaaatgatggtcgcaaattggatctgacctatgtgggaacacgtgcgttgtccgttaaagtgatttacaagtatgaaggtacgatcagcaacattgacacaacgggcagaaaaatcagtgtgttgtctggtaatcagacgattacagtgccttatactacagcacctacggttgagatctataacaaatcgggcgcaagtctgggagatttgaagattggtgacaaagtgaccgtaacgcttggagcaaatcaggatgtagtgcagaaggttgcactgaacactgtggctcaattcgaagtggttgccttggaagcaaatagtcgtattcgagtaaaatccgatctgttgacaagtcagttctacgtggatcaagcggtactgacaggagagagtggtcagacgatcacgccttcacaactgacagcaggcaacctgatcaatgtaacgtttgaaggagctacgccaaaagcggttcaagtcgtgaagcgtacgctggctgaagttacagcggtggatgcttcatctgtaacgctcaaacagtttaacggccagactgaaaccgtgcctgttagcggttctgttaaagtcgtaaaatctggctccacattaacttcattgactagtcttacggtcggagatcgtgtggaaatgacaaaagatacggataattccacacgcttcagagtactaactgttatgagcaaacaattctggtcttatgatggcgtgggtaaccagattttggttaaacgggaaacgacagcagatacaaactatcgttttgcactcggatcaagtgtatttgttcaccagggtgacaatactttaagcgtgcaatctctcagagataatgataatattgtattgtatctcctgaacaatgttattctggagattcaaaaacagtaatcgtttcttttcgaggatcaaaagaatgaccgtcttgatacgggatctttcccgcatcaagacgttttttttgcaagctttttgaggtccccgcaaagtactcggatgaagcttcgaagtaaggctccgcagagtggagtcattttgtgggaggtagctcttcatgaatgcagcgacggttagacatatactcgaaactatggaagcaatgtttcctgatgcacattgcgaattaaatcacagcaatgcatttgaattgacggtagctgtccttttgtctgcccagtgcaccgatgaaacggtgaacaaggtaactgcagatttgttccaaaagtacagaagcccagcagattatctggcagttcctctcgaagagttggaacaggatattcggcgaatcggtttgtaccggaacaaggccaagcatattcagaacatgtgccgaattttaatagagcagtatggcggtgatgtaccgcaggaacatgatcagcttgtgacgctaccaggtgtcgggcggaaaaccgcgaatgtagttgtttccaatgcgtttggagtaccggcaattgcggtagatactcatgttgaacgtgtatccaagcggctggcgcttgcaggttgggatgactccgtacttgaagtcgaaaagaaactaatgaagcgcgtaccccgggacgagtggactttaactcaccaccggtttatattttttggacgctaccattgcaaggcacagaaccctgcgtgtcatatctgtccattgctggacatatgcagggaagggaaaaaacgtatgaaaacgtcccaaatcaggaaagataaggaacgtgtcaccacccgaaaacgaaaaataaattaatgagcagaaaaggatgaataatcatgaaatgcatttccgtgtacactgacaattttgaggccttctccgatatctttgaacaaatcgttgaacaggaaatggctgaaaatgaagaaaaagaagtagaaggcatcacagtaagccactctggcgacgtacctgaacattatctggagcgtatgtccgttaaaccagaagttgttgttatgagagacaaaggcagagacattacaattctgcaacatggacaagtatttgaaatcttgctgccttccatggagaacgcagtttcataagaagtgattacactattggttctgttgtattaatgtcatgatgatcgttgtggttaagatgatcgcatcgcattcatgcaacagacacttggcgtaagcatttgctaaataccgagtataaaacgtattacagataaaaccgacttgttcggttttattttttttagattataggacttatacgttcatttatgtatatttaattccaatcgttcaaattcaaacttgataatgttaaaataaatgttgtaaaagagatagacgtcgaaacggatgtcaaattagaggagccagggggaaggccagtcatgtccagaacagattacccaaaagaaatggccaaacctctgcttccgctgcgtgaagcgatggagcagacaggggaccatacggctgtacaggctataacggatttaatcagcaaggcggaaatgaaacatctgacgattgcgttctgtggtcatttctctgcaggcaaatcgagtctcatcaacagcttatgcggtaagcgggtgctgccttcaagtcccgttccaacaagtgcaaatgtggtatccatacgtaatggtaagccaagagcgcttatttatactactccaaacgtaagcgctgacaatggagcagggacacttgaagtttctccagaggaattggaggcgtattgtaaaaatggtggagcttacagctcgattgaggtatgggatgatattcctctgttgaaagatgatgctgtcctgctggatacaccaggtgtggattcaacagatcgcggacatagtctcgcaacccattcagcgctccatctggcggatgtggtgttctatgtcatggactataatcatgttcagtccgagacaaacctttcatttgccaagagtctgtctgattggggcaaaccgttgtttttgatcgtgaaccagatcgacaagcatcgggagcgtgagctctcttttgaccaatataccgaaggtgtcgaagctatatttgcggcctgggaagtcagatatgacggactgttatttacttccctacgcgacaagcagcatcgctacaaccagtgggatgtgcttccagaactcattggacacatgatgcaagagaaggaagctttaattacgcacagtttggcaagttcggccagtcatgtaacggagcaacatctgacgagagaagcggagaaacgtgaagacgaacagaattccctgctggatgagattggtggcaaggaaggaattgaacgcttggaacgagagctggagcttcttgatcaacaagcagcagacattcgtaacgggccttcgcgagtgcgtgagaaatttcgggcagagctggaacctcttctggcaaatgcaaatcttactcctgcggatattcgtgcgtcggctgctacctatttggagagccgcaaaccgggcttccgggtgggtttattgttctcaggtggcaaaaccgagcaggagaaacaacgtcgtgcttctgagctggtaagactgttacaggatcaggcttccggacaagttgaggtacatattcgtacaatgcttagacagctgggtgaatcccatcagttatggggagcggagtgggaacaggcgcttaatacagagctgcctgctgtagatgaagcactattggagatgaaacgcagtgcgagtgcagaggtatctccagagtatgtgattcagttcagtaaagatgtgcggggcgagattgaggcccgctatcgcaagtcggccatgatgctggccgaccgcatgctggaggcgctggcagcgcgaggcgaagccgcgcttcaggcgctggacgccagccgcgcagcgctgctggcgcaatccgcggcggcggcgcgctacacggcgctccagcgcagcgccgccgcagaggcagcagggctgcgcagcctgctgccccatgcgggccccctcccctccgggctattgccggaggtgaagggcccgcacgtgcccgcggtgcctgaaccgggcgaagctcccggttcgcatgcgggcacgtcaacgtctgtggctgcgcagccacagacgccagaggcaccgccgcagcagcgcgccgccgcagcggcggtgcctgggccatcggcggcggctggcgctgaacgccgccgacgcctggacgcagcagcggcacggcttgaagccgctgctgcgctggtggagccgtaccccgccatggggtcggcggtacgggatctgcgtgcacgcgcggcttcgcttgcgggcggcacgttcactttggcgctgttcggagcattcagcgccggcaaatcctccttcgccaacgcgttgctgggcgaagctgtactacccgtctcgccgcatccaacaacagcggcgattaaccgaatcatggctcctgccgggggcgcggagcatggaacagcccgggtccgcatgaagacccgggacgccttccaggaagacctcggctattccttccggttactcggactgggtgagcctggagcggagtggcaaaagcgagtacgttccctctcaccacaggatgtacaccccgctgggcgcccgcattacagctttttacaggcggcagcagccggctgggaagaaacagcggaccagttaggtcaggatgtgctggtggatctggacggttatcgtaactttgtcgcaaacgagaaaaagtcctgttttgtagacagtatcgatctctattacagttgcgatgtgactgaacaaggcattgtattggtagacacaccaggagcagactccgtgaatgctcgtcatacgggtgtaaccttcaattatatgaagaatgcggatgcactcatttttgtaacgtattacaaccatgctttctcccaaggagatcgccagttcctgaatcagttgggacgtgttaaagatagttctgccatggatcagatgttctttgttgtgaatgccagtgacttgtcttcctctgaggaagaactggagcaggttctcgatcatgtgagcacccaactgcgcagtaacggaattcgggcaccacgactcttcccggtatctagcatactggcgatggaaggcaagatggcaggtgattcgaagttgcttgagcaatccggttttatccgttttgaggaagagttcaaccaatttgcaggcagagaattagccgatcttgctgtaggtggagcttccgaagagatggcacgtgtcattcagcggctgaagaagcgtgcggaagatgcggctcagggggaggaagtattgcagcaacggcgggatgaactggagacgatccagggacagtcacgccagcgcatacagcaacttgcagcaagatccatgaaggaagaactgtcacaggaaacagcagaattgctgttccatgtgcggcagcgacttgcctatcgccttggtttattcatggcagaagcattccatccatccgtacttcgggaggatcggggcaatctgaagatggcttttgcagcctgtggacgtgaactgttacgcatgattgccattgaactggagcaggaactgcttgctaccaccctcagacttgaacaggcaggtcagacctggctgatgaagcaagttacggattgtatagacgaggtgagacagttatctggaggcgtggatgtgtcactgccactgaacgaacgctggagtacacctgtgcttgaagaagttcgtctggaagaaccgtctggatggaaaagctatttgaattatttccgcaatccgaaacagttcttcgaaggagatgggcgtcagcggttacaggaggcacttgatcctgtcctcaaacagatgattattgaagttcttcctgctgcgcaagacaaactgattcagttttatgacaaccagatttgtcaatccttgcaacaccaatcccgtcagttggaagaacgtctggacgaggcggtgagtggaattcaagatacactggagagcggaattccggcggagcaatggaccagcttgtctaaccaactggaacagattgaacgcagttaaaatcacggcataacacgtattctctggaagtctttgtaaaacaaaatgaatgatacagcaagacattgaaaatgttgcgaaaatcaacccaaaaaggcccctgccgaaaaggcatatagggagcctttttttggtacgaacaacctgaaataaagagaatattcaaacatttgattgaaaggtgggtatttaccttcgttaatgcgtcaataagctgaaagcaggcagaatatggtctgttattcgctttgccgcgaatggggtacggtgataaacttcataaatgttcatagtatttttgaacgacataagaggaggagaaacatggatgttcttaggcaactgcaaacctttttttgggaaaagcgaacgtatttatttgtatcaatcttgttcctcgccttagcgaccgcacttgggttagtgtatccgtacatgctgaggatactgattgatgacatcattgttccgcgaacttttgaagacgttcccataattgccttgactgtgttaggtgtagttattttgaaagcgggaatgcagtttttacatggcttttttggaggacgcttgggtaacttcctggcgtacagacttcgtaatgcatgttacgaaaagcttcaatttttatccttccgttattatgatacggccaagacaggtgatctgatgtcccgcctcacgggagatttggaagccatccgtaactttatcggatttggtttcgcccagattcttaacatggttttcatggtcgtattcggcgcaatcatgatgatgaccatgagttggcagcttacgctgttcacactcatatgcatcccattacttgccttcgttgcgctgagattcgaatccaaaattcaccctgcgtttcaggagatgcgactggcgctcagttcactgacaacagcggtacaggagaatatcactggcgtacgtacggtaaaatcctttgcacgtgagccttatgaagtggagaaattctccatacgtaatgagcgttacaagacaaatcagattcatgccgcaacattgtggagtcgctattttccgatcatggagattcttgcttcggtgagtatcgtgctgttgctggtgatcggtggaagaatggttatacagaagacgctgacactcggtgaactcgttgcctttttcagtttgatctggtacataatcggtccaatgtggaaccttgggttccatatcaacaactatacgcaatccaaagcttcaggtgaacgggtgctcgaactgctcaatacgccagtggacgtggaagaaacgcaagatccggtcattgtggaggcagaccaagtgaacggccatgtgacatttgaatccgttacctttgcctacggcaacaaaatgccagcagtaaccgatattaattttgacgctgcacccggttctgtaatcggtttcctcgggggaacagggtcaggtaaatcgaccatcattcagcttctgatgcgtgcctataacgtcaactcgggaacgatcaagctagatggcaaaaacattaaagacataggtattcgcagtttgcggagtcagatcgcttctgttttccaggaaacattcctattctcatccagcattcgcaataatatttcctacgggcttaagaacgtcaccatggatgagatcatccgtgcagcgaagctggccaaggctcatgacttcattatggagttcccggacggatatgacacggtggttggtgagcgcggcatgggattatcgggtggacagaaacagcggattgcgattgcaagggctttgctgaaaaatccaaaaattctggtacttgatgatgcaaccagcgccgtggacatggagacagaacacgagattcagtccggtttccaggaagttatgcgcggcagaacgacatttattattgcacaccggatatcttcactacgacatgcagatgagattctggtgctcgatgaaggccgcgtggtacaacgtggcaaacataccgaactcattgaagtgcctggaccatatcaggatgtttataaaattcaatatgcagattatattgcccgcggtaagcgggaggctggggagcaggtgaattcatgagtgccgaaacgatagcagacaggcgcgaggcaaaagtggcctctgagaagaaactgaatgaacgatttgtgtatcaggatgatgaaattattgaaaaaccgtttaactggaaagaatttggacgtttatttgcatacatgaaaccttatgcaaaacaattgttaccactcgttattctaatgatgatcttgggtaccattacaaaattgtccgtaccttttctgatcagtctggcgattgaccgtgccatcgcaccggcaacggggttgccaagtatgaccatgctttatcttatcgctggctccatatttgtgttgtatctgattcaatgggcagccaatacgtaccggatcaaactgacaaacattattggacagcgcgttatttatgatcttcgctcggatctgttcaagcatatccagaagctgtcctttaacttttttgacaaaagaccggcaggttccgtactggtgcgtgttacgaatgatattaactcccttcaggatctgttcaccaatggtgcagtgaacgtcatgatcgactgcgtacagttgctcgggatcattgtgatcttgctattaattaactggaaactgggtcttgccgtaatcattacggtgccaatcatgtttatcatctcgaccaaactgcgggtgctgatccgtcgggcttggcaggatgtgcgtatgaagaattctcgtattaactcccacttgaatgaatccattcaggggattcgagtgactcaggcttacacacaggaaaaagagaacatgaagtattttgacaacatgaatctgtccagcaaaaagtcatgggatagagcatcagcgatgaaccaaggctttggaccgctgattgagattaccggcggattcggtacattaatccttttctggtttggtgcttacctgattcaggaaggtcagttgaccgtgggattacttgttgcttttgccaactatgtcggcaacttctgggacccaatcaaccgtcttggtcagatgtacaatcagttgctggttgcgatggcatcatcggagcgtatcttcgaattcatggatgaaaaaccaagtattgcggataagccaggtgccaagccactaccttctattaaaggagatatcgcattcgaaaatgtggtgttcgaatacgagaagggcagacaggcgctgaaagggataagcttctccgcggctgcgggacaatcgattgcacttgttggtcatacgggatcaggtaaaagtacgatcatcaatctcatcagtcgtttctatgatatatccggcggacgtctcaccattgacggacaggatgtgcgggatgtaacggtagagagtttacgcagccagatcagcattgtattacaggataccttcatcttctcgggtacgattcgtgacaatattcgatttggacgactggatgcaacgaatgaagaggtggaggacgcagccaaagcagtcaatgcacatgagttcatcatgaagctgcctggcggatatgatactgaagtagaggaacgcgggaacgtattatccatgggacagcgacaactgttatcctttgcccgtgcgctgcttgctgatccacgcatactgatcctggatgaagctacagccagtattgatacggagacagagcttaaaatccaggaagcgttgaaggtgctgttgcagggaagaacgtcctttatggtcgctcaccgtctctcaaccatccggaatgcagataacattatcgtcctggatcatggtgaaattaaagaagagggcaaccatgagcagctgatccaaaaacaaggcgtctataatggattaatagaagctcaatacagatttttgtgatgaaaccttcggacgcctgttacgcgtctgaacacatatgaacttataacactctggtgttttttagcctgatccttcaataataagtgcatcttattcattgaagacaggttagaggatagccggagtgttttttttattcgttagtgtggtatgttatatttttgaagaatgaaatcaatacaatcgttcatggctggagggagatcaatgcaaatggacaacaacgaaataaattcaaagcatttggatcacctggatcatatgaattttaggctccttcacgtgaattatacaagtgatccagcgacggagtggcttctgaggaaacacttcattgaaacatacatgttattatttgtagccagtgggcaagggtggttaaagatagatggcagtttcattgaattaaaggcgggcggactgtacgtaggcttcccggggcaactggttgaggcaaatgtgcattcgttggatgaaagaggcgtgtatcacatgagttttgatgtcatgtacgcactggagcaggagggtggaacagcccttgaaatgatgaagcaacttttacgtaatgaagtaaatggcgaggtcagctcatcttcacccgttgctgttggcgtgatctgtcagatgatttaccaccacacgttgaagaaggatggtttgcaaaggtactatggtcagattcgttttcaggaactgttgtataccatgttttacgacgtggcctttaccgaaaagacggacctggcttcaccaattgaacatgtcaaaggttacatggagcagaattattcgaagagattaaccattgaggaattagcaaatgtggcacgaatgagccctcgacatttcatgcgtttattcaagaaaaggtatggttacagtccagtggactatctaacgctataccgaattaaacaagcccagatcttaatgagaaatgatcacagttatcgactcaaggatgtggcatcgtacgtgggttatcaggatgagacgtatttccggcgtaaattcaagcaaatctctggcattccaccagcagcgtttatacgtaatagcaaacaaaaaattgctgcagttcattctgtgagcattggtatactgcttgcattgcagatcattccctgtgccgcgccggcaagtcatccgtggacatactattaccgacgtaaatatgaaacggacaaagttatgccactcgcagagagtgagaccacctggctggaacagcttcgattagttaaacctgattatattattactgttgggacggagtctgaggatttgcaaagacagcttcattccattgctcctgtgtgtgacctcccgtgggaaaaaggagattggagagaacatttgagatatgttgcaagctttttggacaggtctgatattgcagaggtatggcttcaaagatatgaagagaaggcaacgaccataaaggaccagcttgaggatttcatacgaaaagacagattagttgtactcaaagtttatggtgaagcgttgcagatgttaggcccaaggagcattgcttccgttttttacgttgatatgcaaatggagggtcccgaaggagttgagacttattgggaacggggcacagtgaccattaaggagttatctgttctcaacatcgaaagaatattactgattgttggtgatgatgagacatccaggcagacatggtctgctgtgcgtaagtctgaagaatggcttgcgttgttagcggtacagaatggcagaatggatatgcttttgtcgagcgtcctgctggactacactgcgtttactcatgagcttatgttggatgaaatattaaagttatggcaagatcgtccatagcaaaaagtctgaatagtcaatatcatacctgaacatattttaatatacttactcctatatcaaatgataatgataattattattaattagacgttgtcataactaaatgccatatagggggtacataaagaatgagattcagatggttaacggtactatgcaccatgatgttggtgctcattatttcggcttgcggtgcagcaggcaacgaagcatcctcgagcgagggacaagaagcgggtaccgccaattcttcaacaacagaaacaagtcaggtgaaaaaagtgaacacggaaatgggagaagttgaaattccggtgaacccacaaaaaatagttggtttgtccgttgtatatccagaatttttatattcacttggcatcgtacccattgctgtacagaactaccatgaggattttccttcttacttgcaagagccatttgcaaacacgatgaaaatgggaataggaagaacgcctaactttgaagccctgatggaggcagctccggatttgattatcgcccctgactggtggtccaaaaaggactatgatcagcttactctgatagcacctaccgtacttttgccacagcgtgatgattggcgcgatgaactgcgggatatggccaaaattctggacaaagaagaacaggcagaaaaggtgattcaggatttggtggataaggagaaggtagctgctgccaaattggataagctgattggtgatgagactgttctctacattagagtgatggaaaaagaaatcgtccttcatggggagaaccttgaccgaggaaactttgtccacaaacgattgggaatgaatccacttcctaatttcccgaaagatcaaaccgccatgtccgtatccttggaagtactgcctgaatacgacgcagatcatctgatcgttcagctggatgatgagactaatccggaaattaaaaagaaatttgaagatatgttgtcttcatcgttatggaaaaatctgaaagcagtcaagcaggaccacgtctatatggtgggtggcaaggaatggttcaatctgggaatgtctccacttgccgatgaatatgtcattgatgatattgttgctgcttttgaagcaaaaaacaaataaggcaaacggttcatgttacacatatctcttaattcactactaaataacaggatgtgtccaaaatgaataaggaagatatctatgacttgaccatcgtcggaggcggaccggcaggattatatgcggccttttatgccgggatgcgtgatatgagagttaagatcattgatggcaaagaccaacttggtggttttctgcatacctattccgaaaaaactatttgggatgtgggtggcctgccaccaatgaagtgttcaaagttgattgagtatctggttgagcaggcgaatacctttaatccaacggttgaattgaattgcaaagtagatcggttcgctcgactggacaacgagattttggctctgtatactgctgaaggcgacatacactatacgcgtacaatcattgtcgcagtgggccggggtatcgcagaaattcaaaaattggagcttcaagagccaatggaatgtgagtatgaaaatcttcattacaccgtgcaaaatccagaacatttttccgggaagcgtgtgctcatttcaggaggaggcaacagtgcagtagattgggcaattgaacttgctcaacttgcacggagcgtagtggtcgtccaccgaaaaaatgagtttcgtgcaatggaacgcaatgttagcgagatgaacaatgtaacggatgtcagaacaccatatagcatcacacggcttcataatcatggtgaacgtatccatcaggttgtaattacgcatatggagagtcaggaaaatgtattgttagatgtggatgaagtcgtagttagtcatggatataaaagcaatttaagtgatcttgccagttgtggcttagaaatggacgatggaatggttctaatgagtcaccatgcacagacgagtctgccgggtgtttttgctgcaggggattgtgcaactcacgatagcaaagtcagacttattgccggagccttcaacgatgcgattttagctgtaaatagtgcgaaaaaatacttgactccagatgctcccatgatggcgtatgtctcctcccataatgaaattttcagagaaaaaaacaagcaaatcccaaggttctaaacttgaggtttgtttgcttattcgtgttcactgtaatattaaaatctgctcttttaacatttccttaattttgggaggaatggaaggagtatcgaatctgtgagcagtaattgtaaaatttgatcgaaaaaacacaaaaaatcttgtaaaattcacaagaaaaatagggagcactcttgcaatctttaaccaaaaccccgaaaatagagagacagatatagaagatttctctttgggaggattggaaagaacatgtggggtgctccttttacggctcaagccaaaaaaatgctgctactaggcagtggagaattgggaaaagaggtcgttattgaggcccaacgactgggagtagagacgatcgctgttgatcgttatgagaacgcacctgcaatgcaggtcgcgcaccggtcttactgcatcgacatgctggatgccgaagctttgaaacaattgatccgtaaagaaaaacctcattacatcgtacctgagattgaagctattgcaacagaagctttactggagcttgaggaagagggattttgtgtagtacctactgcccgagctgcacgtctaacgatggatcgcgaaggcatccgtcggcttgcagccgaacaattgaaacttccgacagctgattacctttttgcggacaacctggaacaacttcaggaagccgtacgtgagcttggcacaccttgtgtcattaaaccattaatgagttcttccggcaaagggcagagtgtatgccgaacaccgggcgacgtagaggattgctggaacattgctctttcgggggctcgtggcaaatccgttcgtgttattgtggagagctttgtgcaatttgacagtgagattacattacttaccgttaggtctgtatcaggcaccgtattttgtcctccgattggtcatattcagaaggatggggattatgtcgaatcctggcagcctcatgcaatgactcctgagcaatggcagcaagcttgtcatattgccaaatccgtcacggatgaacttggcgggtatggactgtttggagtggagttgttcctgaccccggatggtgttgtgttcagcgaggtatctcctcgtccacatgacacaggtatggttacaatggtgacgcaagacagttccgagtttgcgctgcatgtacgtgcaattcttggttttccggtcacaggtgtacatctgttgacaccgggagcttcagcaacgctgaaggctaatgatgaaacatctgactttactgtaggcgggattgaagaagctctggctcttcctcgtactcagattcgtgtatttggcaaacctgagaccaaagtaggacgccgaatggctgtagccttaagtgctggtcaagatgtggaagaagctcgtaaaacagcggtgcaagccgctaatatgctgaaagtggaggtaaatcatgtccaataatgttgaggcccctgtactgatgatccgagagtgtgagctacgagatgctgaagcggtaacgggactgatgcgagaggtcagctatccgacaacaaccaatgtcatgaaagaacgtattgaatgtttggaaaccaatccaaacgcatgcatgcttgttgccgaagtggatgaacaaattattggtgtgattggcttgcaatgtgtgcaaagtcatgcctatccagaacctgccgcacaaattacttccctgattgtaggtcaagaacatcgtggtggtgggattgcccgtcgtctgatggctcgtgccgaagactggggcagacagcaaggtggtaaacaactgtttgtcacgggtgcaaaccgtgaagtgacttcaacaacgtactctttttatgagcacattggttttcagaagagagggtatcggttcagtaaagttcttctatagtacaaataaagtttcttctattgcatggaaattctcatgatatcctgatctgcacattctggtgtggtgaatgataaatagatggtgaagcgacattcgactagtatttttagtccgaatgtcttttttttatggctaaaaaatgacaaaaaagttacttttccatattttataggttcacaatctcctgtcgaattgatatactgctagagtattaattacaaagttgtaataactaatcttaaggagatgaatgaatttgaaaaagaaatggatgaaaactgtcgtaacgagtagtctgacagccgtactggccgtaggggtaatgcttcctgcttccgcgtctgctgcagattcaacatataagactatcacaacgtacaaaattacaagcacagacagcttgaaagcttacattgagaaatggctcaaacaaaatggatacaccgtatccgaggggcaaattgtagagaaacctgctacgcagcctgatcaaacgacgaaacctgctgagccgacaacaaaaccaactcaaccaacaacaaaacctgctgagccgacaactaagcctgagcaaccgactaaaccaacacaaccagctcaagaagaaaaaccggaaactacaccggctaaagatccttcaaacacgggtaacacaggtaatacaggtaacaatacaagtaataatggtagcgaaagcacacaatccgactttgctactcaagttgtaaaacttgtgaacgctgagcgtgctaaagcaggtctgaacgctctgacttcagatgcacttctggacaaagtagctgttgctaaagtaaaagatatgagtaacaataactattttgatcaccagtcacctacgtatggttctccgtttgatatgatgaaacaattcggagtaacttacagctatgcaggtgagaacattgcccaaggacaaaaaacaccacaggaagttgttacagcttggatgaatagtgaaggtcaccgtgccaatattctgagcaaaaactttacgcatatcggtgtaggtttctacaacggatactgggcacaagagtttatcggtaagtaatcgatttataatgaagaaagtatgattttcttttccacaaggttatgccagtacacagttcaaatctgtgtatggcataaccttttttccgtaaaatgacatataaaaaatgaattctgagaatgcagcgccaaagtttgcaaattaacgacagaacatttatgttatttaggaatagcatcatcagggcgtgtctgaaaactccgaagtaatcggattttcagacacgccttaatgtaaagtcattataaattataaagcacccggactggtgtacatgagcggagatgtgatgatgaaaaagaaaaaaagccttgattcagcaccatggatctggagaactgtcagtacagtatccatcttggcaactttgctgttgttatttgggtttggttacgccataaaagacgtgattttccccgagggagattccgcattaactacaggccaggggacaactgctccatctaaggatatcgagggggaaccggctgtcgtggaagatggcaagattcggatggccgtcatcggtgattcgctggcaagaggcacgggcgatgatgaaggactcggttttgtgagacgtgcagggaacctgcttaaagataaaggatatgacgttcaggttcttaataatctgggtgtaaacggtttgagaacagatgctttattggaaaaactcgatgagcaaggcgtacgttatgtcttacaacaatccaattttatcttgctctcgatcggcgcaaatgatttgttccagggaggacaagttctacagggggaagatccgccaacagcagagcagctggcagcggctttgccggaaacgtcgaagcgccttcaagagatattgaagaaagtaaaagaaattaatcccgatgcgcagattgcgtacatagggttgtacaatccatttggcgatgtgaaggaactggagaagccaggtaatgcagtggtagctgcatggaacgatgctgcactggctattttgaacaatgaggacaagatgacactggtccctacattcgatttgtttgaaaatcatctgggggagtatctctcgtcagatcagttccatcccaacggacaaggttatgagcaaattgcagttcggattgcacaggaattccaggcagatacaccggcagaagggagcggaaattaaatggcagagcaactgtatgattccgtcctatccgtacagaatctgaaaaagcggatcggacgcaaatggatcattaaggacgttacatttgacgtaaaacctggtgaaatcttcggatttctcggtcccaacggtgccggcaaaacaaccacgatacggatgctggtcgatctgatcaaaccaacagaaggaaaaattaaagtttgtggttatgatgtgaatcgggaccctgagcgtgctttgaagtatgtaggctccattgttgaaaatccggaggtatatacatatctgacagggtgggagaacctggagcatttcgctcgcatgcaaccaggtgtggacaatgaacgaattcaggaagttgtagatattgtgcgtctggatcagcggattcacgataaagtcagaacgtactcattgggtatgcgtcaacggctcggtattgcacaagcgctgcttgggcgaccgcgtctgcttattctggatgaaccgacaaatggtcttgatccaaaagggattaaggaacttcgtgtctttattaagcaacttgccagcgaaggtatggctgtatttgtcagcagtcacttgttaagtgagatccagcttctctgtgacagagtagccattatcagtgctggacgtgtgcttgctgttggaggtgtaagcgaactgattgaagatcattcgaagttggctatatggcatgtttcgccactggagcaaggcaaaaaaatgttgcaggatgcaggcattgctttggtaggtcgacctgcggatgtgatggatgataccattgttgcaggccttggtcccaacgctgtggttgccgagatgcacgaagatcgaattcctgatatggtgcaacagatggttcaagctggtgtacaggttgaaggggtacagcggattcagcctacgcttgaacaactattcttaaaaatgacagaaggtgaatccattgagtaatatcatgccgctgatccgcaatgaaacgattaagatggtgaagaaaaaacggctttatattatatttattgtacttgcggtcctcgtaccgatgtttacgtatgcccagatgaaatctgcggagaataatcgcgacaagtttgacggcgattggcggcttgaactgcaacaggccatcacagacaatcaaaattcgctcggtagcgatcgggtacctgaagagtacaaaaaatatagaacagtatatatccagcagatgcagtattatcttgagaatgacatcaatcccaaagaaccgggcggtgtcacctttacgcgggagttcatgaacaacgcggttggattgtttattccactgttaatcatggctattgcttcagatcttgtttctggtgaacgtacgacaggtacgattaaaatgcttttaacgcgtccggttagacgctggaaagtgcttttgagtaaattaattacgctgattatgtttgtttcgatcatagtggtatcagcctacattatatgttatgtcatatcgggtgcggtctttggttataaaggcttcaacatgccaatcttcacaggattcaaagttgtgggaacagatgtcgatatgtcggcagtgcatgctgtagaccagtggctgtacatgctcatgcaggcaggactgatctggtttgtgagtgtaattgtggctatgcttgcatttatggtatctgtgcttgtgcgcagtactgctgcaagtattgttatcatgatggccgcgctgattgcaggaacaatcttgaccagtatggcagcatcctggcagaccgcgaagtatctgttcatggttaacctcgaacttccgaattatttgtctggcggattacctccaatcgagggtatgaatttaggtttttcccttattgtgcttagtgtttggggcattgcttcactcattgtgtcattccttgtctttacgaaacgggatatcttgaattaaaatggacaaggataagaaaacatctgtttgcattttaggcatttttttagttgcaagttaagaagggggagcatgaatggtcgagcaaatcgatatgtcggcaggttcgacaggcggaggacaggggtcttcaggctacgacgcggacgacattcaagtacttgaagggttggtagcggtacggaaacggccggggatgtacatcggtagcaccagcacttcaggtttacatcatttggtatgggaaattgtcgacaacgctgtcgacgaacatctcgccaaattctgctccaaaatcgatatcacgctgcataaggacggttctattacggttcaggataacggaaggggaattccgacaggtatacataaaacagggattcctactccccaggtcgtgtttacgattttgcacgcaggcggaaagttcggtggatcaggatacaaaaaatcaggcggtttgcacggtgtaggtgcgtcagttactaacgcattgtccgagtggcttgaagtcgagattttccgtgatggcaagattcatcgtcagcgattcgagtattggaaggacaaaaaagggattgaacatgtcggtgaaccggtctccggtctcgaagtgttgggcaataccaatcggacaggtacaaaagttacatttaaaccggatattcgggtgttccagagcggtattcaatttaattatgatacattggcagaacgtcttcaggagattgcttttctgaattcgggtctgagaattgtgctcaaggatgaacgttcgggcaatcaggatgaatacatgtatgaaggtggagcaagccagtttgttgcttttcttaacgaaaataaagatgtgctgcatgatgttattcacttctatgcggagaaggatgacattgaagtcgaagtggcaatccagtataacgcgggttataccgaaacgctggcttcgttcgtgaactcgatctctactcggggtggcggtacacatgagaccggattcagggctgcgtatactcgtgtaatgaatgactacgcgcggcgtaccagcatgattaaggaaaaagataaaaacctcgaaggcaatgatttgcgtgaaggtatgatggccgtcatcagtgtcaagatgtcagaggttgagttcgtaggtcagaccaaggatcagctcggcagcgcttccgctcgaagtgcagtggattcggtcgtgtccgagaatatccaacggttcctggaagaaaacccgcaggtagcgcaaacgttaattcgcaaagcggtccaagcctccagagccagagaagcagcccgcaaagcacgtgatgatatgcgcacaggcaagaaacgtagcgaaagttccaacctgaacggcaaactaacgccggcgcaatcaaaggattttacccgaaatgagttatttattgtcgaaggggattccgcaggtggttctgccaaacagggacgtgactcgaagattcaggctattctgccgctcaagggaaaaccgctcaatccggaaaaatcaaagctggccgacattctcaaaaatgaagaataccgcgccattacagcggcgatcggggcgggcataggaaccgaatttgcagttgaagacagcaattattccaaaattatcattatgaccgatgcggatacggacggcgcacatattcaggtgttgctgttgaccttcttttatcgttatatgaagcctttaattgatgcaggcaaagtatatattgctcagccgccattgtacaaacttactcgtaagtctggtaagcttgcgagtgttcgatatgcatggacggatgaagaactggctaattatatgaaggaattcggtaataatgttgagcttcaacgttataaaggtcttggtgagatgaatccggatcaactgtgggagacaacaatgaatccggaaactcgtgcgatgctgaaggtacagattgttgatgcagcaaaagcagaacgtcgtgtatctacgctcatgggtgataaggttgatccgcggaaacgctggattgtagagaacgtcgactttacagagtacgaagaatagaaggtgcttggaatgagtccatcagaacaatttatgccggcctttctcgaagaggtcgttggggaccgtttcggtcgctactccaaatatattattcaggatcgagccattccggatgtccgggatgggttgaagccagtacaacggcgtattctatacgccatgtacgattcaggtaatacgcctgacaagacttaccgcaaatctgccaaaaccgttggggacgtaatgggtaattatcatccacatggtgactcatccatctatgagggcatggtgcggatggctcagccatggaaaatgggccatatgctcgtggacggtcatggtaactggggatcacaggatgatgacccggcagcggcgatgcggtatacggaggcccgtttgtcgcccatcgcgatggagatgcttcgcgatatcgagaaacggacggttctgtttaaggataattttgataatacggccaaagaaccggttgtattgccatcccgttatccgaacttgctggttaatggtgtcagcggtatttcctccggatttgcaacggagattcctccacacaatttgcgtgaagtcattgatgcttcgatcgctgtgatggagaaaccgtcgattgagctggacgaaatcatgatgtttatgaagggtcctgactttccaacaggcggattgattatgggcggtgacggcattctggatgcctatcgcacaggtaagggacggatctatatccggtccaaaaccgagattgaaaacatgcgcggtggcaaacagcagatcgtcattaccgaaattccttatcaggtcgtgaaatctcgtctggttacagcgatggagaacatccgacttgagaagaaggttgaaggtattgccgaagtgcgtgatgagagcggacgtgaaggtctgcgaatcgtggttgagttgaaaaaagaagcggacgcacaaggtattttggcttatttgctgaagaaaaccgacctgcaggtcacctataatttcaatatggttgcgattgtgaataaagcacctcatcaattaggattgaaatcgattctcgaggcttacattgcccatcagcgggaggttgtaacattccgtacccggtttgagctggagaaggcgcaagaccgtgcgcatgtgctcgagggcttggtaaaagcacttaacatccttgatgaggtcattgcggccatcaaagcgtcgaagaaccgtcaagatgcccaaaacaacctgatgtggatgtttggattcacggaacgccaagcggattccatccttacgttgcaattgtaccgtttgacgaatctggagatcaattctctggagaaggaactcggtgaactgatgaaaaagattgcacaattacaatccattctggatagtgaccgcaagctcatcggagtcatccgcaaggaattgatggagattcgtgagaaatacggcatagaccgtcgttctgcgatccagggtgaagtggaagaacttaaggttaatctcgaagtacttgtgaatgcggaagatgtatttgttacgttatccaaagagggatatgtgaaacgtacaggcatgcagtcctttacacgttctggtggtgaacggagcggaagtggtgtgaaagacggcgattatatcgctcaggttctggaagtaaatacgcttgagaacttgcttgtctttacgaggaaaggtcagtacttcctgttacctgttcaccaggtacctgaattcaagtggaaagatccaggcacagccattgtgaatgtcattccccttgctaaagatgatcgtattgcaagtgtgcttgctgtgaaatcctttgaagagccaaatcacagtctggtcttcgttacgcgaagaggacaggtgaaacgaacggagctgaaggattacgttaccaaacgttccggtgcagttgcggcttgtaaagtgggcaaggacgatgaagtgttatctgtacatctaagtacaggtggtcaagatattatgttgattacaaaagaagccatggcgattcgtttccgagaggatgaggttaatccaatgggacgtgtatccggtggtgttcgtggtattcagttaagagatacagatgaagttgtatcggctctatgggtagaaggagatgaaggtgaagttgccgtgttgtccgatctgggatatggtaaacgatcattacttctggattacgctatacagagccgtggaggcaaggggcttgccacattcgagttcaaagaaggcaaacgtgtgaaaccgaatggtagccgtattgttggagcgttttattgcaaagagcaacgtaagatcactgtaatgaccaaagaaggccaagtgttcccgatctcttcggaaggtgttccgattacagagcgcaaacatattggcaagctgatcgttcatgtggacaaacaggacgagatcgttgaacttctaagggacttcaatgagaatcaaccagcatcatcttcataaaaacaaacaaacgagacttttcgcagaacagctaatcctgtcatgcgaggagtctttttttgttgttcaaaggcggattagaagagggcattcatgcgaagtttaacaaccttcgtcgattacggtcgatcgctaggaaattgaaaaaaggcagcaggaatgcggctttggagcgcgaaaacttaagcaggtgaagtgataaccggttgcagagaggagcgatggaagatgtataattccgattttgccaagtgctggtccaggttgaccaaagattataaattgcatatggatcaagagctggcaccctcattaacggaggctcagctggctgttctggaggtacttgaagaccatcagaagatgaaaccttcggatctgattccttatctgtcaactacgccagctgctgtaaccatgctgctcgatcgaatggagaagaatgatctgattcgcaggaatcgggataatcaggatcgacgcattgtgtgggtatctctatcagagaaaggaagaatggagacagcgcggggaatcaccatccgtaatgaattcatgaactctgttctcagtaacatttcgatgcacaatcaacaattgctggtatatctgttaggcaaaatgacaacacccaagaccaaagagcctgccttatctacttcggtatgataccatgctgattcttatgaataaccataggagtgcctgctcgtttcatgcaggagccctatggttattttatttacaaattacatatgctacacactgtgtccaggttagttgagtaaaggcatggatgtaacacagttagtatgtcctaatattatttttgtaaattcatatgtaaagagttgactatgtaaatatttttgttataataaataattgttcccctgatatttcgtgtacgaaatattatattccaaaagtaaaagggtgaaacaatgactgatacgtatgaagtattctacattattaattcgttccgccaagtgaatcaaatgctttttcgagcattttggaatgaaaacaaggagatcgagctgacttcgatccagtttatggtgttatccatcctgagggagcgtccttccattggcatcaacgaagtggcagagctatgccatatgggcagcagttccatgagcgctgttgtggagcggctcgtcaaaggcgagtatatcgttcggacacgttcggatgctgaccgccgatccgttaagcttcagattacggataaaggggaacaggcccaacaggaaacgcaccatttgtggatggaaagagtgtcacccattctggatatatcgaaggaagaccttgagcacctacttagaattcatagtcaaatgattgaaaagttagaaggaagagagatgaacaacatatgagtacgactactgctgcagctccatcctcagcgatggacaacatcaagaaaggccctattgtagcggcattgttaattggtgcctttgtggcattcctgaaccaaaccctgatgaacgtagcgcttcctaaaatcatggaagacctcgcgatcaatgcaaacaaagcccaatggttaactacgggttatatgctcgtcaacggtgtactgattccggttacggcatatctgattgccaaattttcaacgcgtcaaattttcattacagccatgactctatttaccataggaacgttagtctgtggtcttagtccaaccttcactattctgatggtaggtcgtgttattcaagcggcaggtgcaggtatcctgatgcctctgatgaccgttgtattcctgaccatcttcccaattgagaaacgcggtcaggccatgggaaccatggggattgcgatgattctggctcctgcgattgggcctacactttcaggttatgtggttgagcattattcctggagattgttgttctacatcatcttgccattctctattattgcaacggcaattggtattgcttttgtcaaaaacgtaacacgtcagtccagacctaaactggattatccaggcgttattttatctacacttggttttggtagtttgctctacggattcagtgatgcgggtaccgatggatggggcagtgcaattgtcattggatgtctcgtcgtaggtgcgatatccctgattctattcgttattcgtcaactgacaacagatcatccgctccttgagttccgtattttcaagtacaacatgtatacattaacaacgattatcaatatgctcgtgaccatggcgatgtttgcaggtatgattctgcttcctattttcctgcaaaacattcgtggattctcaccgattgaatcaggacttctgatgatgcccggtgcgatattgatggggattatgtccccaattacaggtcgcatatttgataaagtgggcgcacgctggctttcggttgcaggtcttgccattacggcaattacaacttttggactgagtcgtctggcaatcgatactacctacggctacatgatgtttatctacacggctcgtatgttcggtatgtcgatgctgatgatgcctatccagacagcaggtctgaatcaactgcctcaacgtctgaacgcgcatggtacagcgatgtccaatacattgcgtacagttgccggggcgatcggtacagccattctggttaccatcatgagtagtaagctcaaaacacatctggcggatgcagtggctgcgggtcaggttaatccaaatgataagaccgcaatgttagctgctactgcagatgcaacgatttacggtgttaactatgcattcattgtggctaccggaatgactgtggttgctttgatcatggcgttctttattcggaaaacaaaaccagctgttgagcctgttactgtagaacaggaaaaagcgacggctacagcataacgaatatcagataaaaccaaaaagagaactctaacagtcgaaggggtaaccctaactgcctgagttctctttttttggtgtgcgcgataggaggagagtacttttattattcgggctggatcgttggatcgataagaaatacaggatcgggctcatgaccgaactgtttgagattaatggttccgtttagttgaaactccacaccttcgctaatcagttctgtttcctgcatcatgcgcgagtgttcgtccggtatggagatttctccttttgcattgacgacacggtgccagggcagacgttccttgcggctcatcgagtgcagaatacgtacgacttgtctcgcggctcttggactcccggcatgggctgcaatctgaccgtaagtcatcactttaccttcgggaatcgccgcgatgatcgcaacgacttgtttggtaaacggggtcatcatgatgtctcctctctgtattttaggtatacagctgaaaatataagaaaacgtgtcgttcagatacagaatctgaacgacacgttgtatggacagatgtaacctgatcctgtgcacttatagaggttgttcgataataccgcttctgatcccatcgtaacggtactgaaaatcagtcttttgaacacgtacttattgaggttgtccaaaagctttttggtacacggtagcgggccattctgcccaggggaattctcttgcaggcaaagattgcagaataacttcttccttagtaactggatgaggaaaagcagcaatcgccgaccatagagcaatctgttgcccgggtttattcacgcttgcgccgtacttctgatccccgtacagagggcagccgatttctttcatttgcactcgaatctgatgagatctgccggtgtgcagttcgatatggacgaggctgtaacggtctgtctcgccgataacacggtaatccagaacggcatccttaccgccagccgtacctttaggtacaacagtaacggtatttgtacgtgcatctttcaggagcgtgtgttttaacgttccctgctgtgcaggtaacttgccatgtacaacagccgcatatattttacggaaatgacgtccccgcacagtctcggacaatctcgaagctgctttagaagtcttggcaaaaatcattgcccctccaacaggacgatcaagtcggtgtactaacccgagataaacattgccaggtttgttgtatcgttctttcaaatcctgcttcagcaatgtaagcaaatccggatcacctgatgaatcttcctgggtaggtacattgaccggcttcgtaatgcctaacagatggttgtcttcaaacagaatcggaatcgcatcgtggtcatgccgatgttctgacatgattaagactcccaacggcccagaataccacaaggcagatcaagaccactacgtgtgatcggcagaccaatttcacctgcagtaatgtcaccaccgtactgagcagacatcgtcatggtcaacatgttgcgcagaaccgtagaggaaatgcccgtagtgtaggagttaaccagcatgaataatggattatccgacaagatcgtcatacatgacttcaggaaaggatataggttctcttccagtttccatgtctctccattagggcctcggccatatgaaggagggtccataataatagcgtcgtaacgatttccgcgacgttgttcccgttgtacgaatttgaatacatcatctgtaataaaacgaacagggcgatcagccagtccggataattgaacattttccttggcccattgaaccatgcctttagctgcatccacatgcacaacagaagcgcctgcgtaagcggcggctaccgttgctccgcctgtataggcaaacaggttcaagacagaaatagggcgtcctgcattggagattttatccatcatccagctccagttggcggcttgttcagggaacagaccagtgtgtttaaagctggtaggtttaatgtggaatttcaggttttcgtatccgatcgtccaacgctcgggaataggctttatcatatcccagttaccgccaccggaagagctgcgatgatagtgaccatgcacctgacgccattcattggtttcttgctcaaggggccagataatctgtggatcgggtctgcgtaaaatcacatctccccaacgctccagtttctctccgcctcctgtatcgattacttcatagtccttccaattcttagctacgtacataatgatttatccatccttcaaaagtcatttggatactattgtacaacaaaaaagggcttggacgccagttgggggacgggagtgcgccatatactgaaaaacaaagataaccaaaaatttaatttgacaatgataatcattatcacatatgattttgttaatccaaatttcattctttcttcatagagagaatataacatgatcaaattaaagtgagggaaaaatagatggctaaattgttagtggcttatgcgagcatgacaggaaatacagaagaaatcgcagaactgattgtggaaggaattacacagggaggccacgaggcagacctgaaatccgtaacggattgtaatgcatctgatgtattggactatgacggattcatgatcggtgtgtacacctggggagatggggagttgccggatgaattccttgatttctatgaggagctggatgagcttgacctgagtggtaagagggctgcggtgtttggtagtggtgacacctcgtatgagcagttctgcggtgcagttgatcttgcggctgccaagctgcaagagcgtggggcggaggtatctccagagatgttgaaaattgaatacagtccgcttgagcaggagaaagaaacatgccgtgactttggcaaacgcttcgctgctgccggattacaggtatcctaaagatcatgttaagacataatgttcaggcagcgatgccagtcggaaggaatgaccttcctggacgtctgcttgaagattacagattggaagaaatgctgcgcagcccacaccgattcatccgccctgaaccagtgtctgagcagcgtcttccactgcaatggaggcaccgtgtacaatatgcggtgagccatgcggtcaatgctttttacagtctcgaccccgatgttcgcaaagaggtacctgtacagtatttacttgagaagtggtggcccagaaagacggatggtttcgaatctgttctccattactgggatgtgaagaacaagattacggatgaattgtcactcgccattgcaatgaacgatgatctgaagcatccagccattctttttgaacagtggagaacggagttaccttcattatccatgcatttgtcgatgatatttcaggcggcctggcagccagaaggctgggattcgctgcttattcagaaatatatggttgtccatgatccaaacgtagttgaggcatttcagcatatggtcagtgcattctgctgggaagccttcggaaaattaccgggtatgatcgagatatactgtttgttggaaggacgcaaaatcaggtacatccctggacgccagtctctgatccgttccatggactacattcgcttgatacgtgacagcatgccgcaagcagaagtggtggagtcagaacagtttacgacgcgtgataaagcgcgcatccacgaagaggtagatcgctggagaacggaagccattgaaccgaagaaaacatggttgatgtgaagacagttgaaggataacgatatatcatgcagatagaggaggggaagttgccatgtctaccggtctaagtcaagatataagcagtagcaagagacgtgcaggaacttgtgaattcagtccgttgccagtaccccagtcggttatacgaaagttgcttgatgaagcagatccttcattatatgtaatgagttcagaaccttggaggtttatgttgtttgcaggcgaaggacgacagctttatctggaagcggtcagacagagctatccaccccatctggctgatcgctacggcgattgggctacatatcaatacacggaagcaatccctacccatctggttgtcgtggcgcctagaaatgcccgtgaggatgatcttctgccggccaaagcctggagcaaacgctttagtattctggctgcggaacaggggttgaatgcggtctggaagatcaatgattatcaacaacatcctgtgtttatgaatttgatgggtttgacaagtgaagagaaggtgctgggggtattccatatcggttacggagaccagcctgcattgcgggatatggatgcaagcagaccagcctctgaactgatgacggtatatgaccatctggtctaaaaaaatgattcattagttctcttatttgctggtgttgaatagaaaatcacgaacgagctgacgattcgtctgatctttgttgtagacggagaacaaccgattggataccgtaagaacattgccaaagaagaatcgttcgaattgggtctgtctgcccccgaatgaaccagacccaagctcccagatcaggcggaacagagcgttgcgttcgtgagaagccatatcgttccctttcagatatatattcagtgaaggagcgatatcggattgaaactcttcttcctgagggatcataatcaccccgctcgaacccaagagctgcagaatttcaatcatctcaggataaagtttcggaaagaggagattggctgccatcaatggtttgggtgcaggtaatacaaatcctcttccgtctggtattgcacctgcctccgcggccaaggccaatgcttttaacgattcaagacctgcgaacacacgtgcagatttctctataacatgtgcttccgtattcagatccagcgtatccgtgagaagctggattgtaccgagaacaaattccgtcttggcaatataacgacacaatacctgatgacctgcgtgaatatgaaagttactaccactgaagagacgcgaggacatttcctcacttcctgcaaaaaatattcgttcatgcggaacgagcacccggtcaaagatgacgatattgtccatttcttcatatctggaactcaggggataattagtgtgggattcggctgcgtaggtatccctgcataccagactgattcctggaagatcattggggacagcaaaagagaatgcaaatggattttcgtcatcaaatggggcgggtgaaggtgacggatagacaaaaatctcatccgaagtggcagcttgtgtagccatcatgaatgcaccgctaataatgagaccttcctcagtgcgatccacgacctttgcggcaatagcatcctccgtagcatccaattgccctgagattttgctggcatatggctgaatgaaggcatgggatagtgtgatatcatgatcacggcagtacgcataataatttttgagattttctgcatattggggagataattctttcaggagatcggcacctgtgtaaaaggacattatggctgtattcatgtaatcgggtgagcgaccaagaaagccatgatgcacatttgcccagatattcatcccttcccgtcgtttacggaggtcgtcggcactggttggaggcaggaaggatatgcctacaggtttgccgtctgccggggaggcatacgtcatcgtttctgcaaatttaggatcagattgcagatcatacatgtacatctgagtctccatcaaaccagcaaatgctacatgttcagagcgttttccagtaataagtttacctttgtaccagcaggggacggactgtgcatcaattcgttcgcgatactgtgtgccacttttaacaggcattgttattcacctcttggttctaatcgttcatgggcatactgacttcttacgtagtgtacgtaggtcatctgtccaatgtgcattgaagaggtgagaaggatttttacaaaatagggcttgataataattatcattcttgttacaatagacaaagaaaaaaggaaccggtaagggctcctttaagtggatcaattgaaattacttattttacttcaaaagtcttgcagtctgtttcagcagactgacttgcttctttgttactgtgactcacaatgtagatcgaagaagcgttacatttgttctcttgagcccagtgacgacaggaattaacttcacacaatacgtcttttgccatgattgttaacctcactttaattggattacagtcgttggtataaagaatccggatataacaagttgccgcttgtcaatctggaaaattttgttgctctcacgaaattcggagggcttttttgcgttatacacaacgatgcatattcagaatagcaaattttcttgatgcttgcaaccaaatgcccccttctgtggcaaaatagtggacgtgttgtggttatatttgcaaaaaggcagtagtatgttattatttaatagtaataattacgattaaaagtctaattgattctatataaattgaactaaacatttacacgaaaacggagaggacagaaagaacctgaagaagcggagcgttcgcctttatccccggatttccgctctagggaaataatcaaaaaatctggggataacagcgatcggaaggttgttctgtcatcgaagtggtcagtgtaaatattcattagttcaacttatataacttgaatcatggactgaaaccataaatgaaggagcatgtgaatacatgagcaaaataaaccatatgaaccggattccccgcgcgaaagggatcgatatggctgctttttacacgccaaaagagtgtagacgcaaagcccagcatattgtattttccgctgaaaatgaacgcatcattaatgaatttgtcaccattctgggcatgaaagagaagttcagagagcatgatgtatcaatccccaacaaaatggtcatgttcgggccacccggtacgggaaaaacattaacggcatcacatctggcggagcgccttgatctgccattggttcttgtgagattagatgcgatcattcatagccatcttggtgagacggggagtaacgtacgtaagttattcgaatatgcacgaatgaatccctgtgtgttatttctggatgaatttgatgccataggccggacacgtgagagcaatgatgaagtgaaagagatggctcgtgtcgtcaatacgttgttgcaatgtctggacgaattcgatggggacagtattctggtggctgcgacgaatctggaaacccaactggatcacgccatctggcggcggtttgatacgaagatgacctacggtatgcctgatgattcgagtcgcaaattgtatatcagcaaattggtaggggcatttgaacaggagactcggctggaagattacatatgtgaacgcttgactgggtgcagttatgcggatatagagcagatcgttctgaaagcaaagcggaaagcaatcattgccagtagtgcacttcataagcaactgatctcggatgcttacgatgaatacagaccacgtgtattagagtgttgattgcttccattctggataaagcaacaaggaacatgttgaactagcccagtctcctgaatggagttctgggctagttgtcatgttagtgaggtgcgttatactttaacggctgctccgtatgctttttctgtattcatggcttcttgtgttgcagtccagcgtggcaggcttaatctgaacatgctgccttccgggctgctggagacaagtgtcagttcaccgccctgttcctgagcgagtaggcggctatatgttaatcctagacccagaccgcggttacgacgtttcttgagttctccacgatagaaccgttcgaagattttgggttgttcttcggctgcgatgcctgtgccgtggtccttaacatcaacgtacagcatctgtttttctgtacttagataaatatcgaagacggccttctgttcaggagctgtggcatgaagtgcgttattaagcaaattgacaatgatctgctgaatgcggagagcatcccccatggtaaaaaagttaattggaggggcgtgcagctgaacctctggcattttgtcctcatacgcaatcttccattgatagatgatctcaccgaccaacagtttcagatccgtccgttccttgcgaacggcaacacttcctgcagccatggcgttatagtcaagcaaatctgcgaccattcgctccatacgttcagattccttcaaagcgatatccaaaaattctttaccttcctgtggactcacgacatcgtcacgtactgccataacgagccccttgatggaagttaccggcgtcttgagttcatgacttacccctgccagcgaaagtgtacgccattcttcgagttgttggagacgagtggccatatcgcggaatgaatttacaagttcattgatctcacgttctcgtgtattcagatcaagactcacatcatagttgccacctcgaatctgctcagcggcataggcgacctgacgaatcggtctggataactttttggacaagagatagattgtaaaccatccacagaggattagtcctccgaggattagagccacgagccatatcgtctctggaccaaatgtaatggattgtttggactgcatgacccacactttacccaaggtttgatcgccctcagatatgttgaccgttacacctgcatatttgttgtttcgcggttcaagatagtcgtctgacagtcgataatgcacatctttttgctccattttaggctgggaaaagatcaattgattgttattgtccaagatcatgacacaaaaataattatctgtgttgaatagtttctctcgcttggttaccagtctgtccagatcgggtggaactcgaagcatattattctcactggtcactcgatcggcaatctccagaccaagcagttctgcggttttgaggcttttctcaatggaagttgttcgaatccagtagagtgcccctgccgcaataatcgtgaaaccaatgcacaaaatgagaaaatatcgcagtgtccagtgtgacagaatggatatcgttcgtttgggtttcttctgtttcagttggcgatccaaaattgataccccattcctcgcaacgtccgaatttctcccgtctctggcgaccagtgggagagggcttgacgtagtcgtttaattgagagatccacagcacgatcactgccatcatagtccatcccccatacctgttcaataagatgatctctggtaaatgtacgattcggataatcggacaggaagaacagtaacgacaggtcacgaggtgtgagtgcaacctctgcaccgttcagcagcacctgcttggcagcaagatcaatgacgagatttccaaaagaacgcttctcttcgccacctgaggtccaatgtggattacggcgcaataccgcattcactctggcgaccacttcttccggtacaaaaggtttactcatataatcgtcagcaccggcatttaatccgttgagacggtctgaaatgtcatccagtgcagttagcatgatcacgggacaagcacttttttcacgaataatccgcagcagatcccatccgtccattcctggcagcatcacatcaagtaataccagggaaggcgttacggtatcaaaaagggtaagtgcagtcggtccatctgctgcatgatgaacttcaaattctgcttttctcagataagcagccagtactcgtgcaatagcttgttcatcctcgacgataagtatggatttcaagaaaagcgttctcctttcgctgagtaaacttgtactgattttacatgagctagagcgtaaagccaatcctgtattacgaatttcaaaaaaatatgtgacttgtcttatcttgacttcttcctgacacattcaattgatatgattcactccaagaagcaacctaaacaatcatgtactggaggaaacatagagatgaacaagaaagcaaaagcatggcttattacaggtgtagcggcggttgccgtaatcggtggcggtggttactatatcacaaacagttacttgggcaacaacgtggagattgagcaggtgcttcctgcgagcacagcgacttccaccacagctgtagatagcacaggaacggttgtagccaatgaaactgctggagcagagcaactgaatggagactggagcatcagcgaaggttccaaagtatacttctccgtaaccacatcacaggagacagttaacttcgtggacgagaaggtaacaggcaattggacaattaatgtagatgatgctgctcagatgaaggcagaaggacagatcgagatggacggaattgattccgggaatggacagcgtgatggtcacgtgaagcaagccgatttcttcgatgtcgctacatatccacaagctacatttacagcgacttcatttgaaggggtacctgcggaatggcctgtcggtcaaacggttgctatcaaaatgaatggtaccattacggttaaaggtattgaaaaagaagtaacctttgacgcaaaagctgcttatgagaataatgcagtattgttgtcggcaacatcgatggtaacgttcgaagatttcggaatggaaaatccgcactccgttgtgctctcgactgaaaatgatatccaggtacaacttgaattgaaacttactaaataagtgtaacaatgatcatatacctgaaaatctgttctgttctgccttacggtagacggacagatttttttgtttttcttacaaaatagtgtgattaatataactcaaatgtaactgtcacaggatcatattgttaaaataactgctgtttcctttggaaaatgccgtgttacccatcgctattaagcgcttacaatgaggaggaatcataacattcattgatccatgcacaatcaaacacaaaaagggggagatcaagagtgaacaaaaggtacataagcgggtgtctggtattactaatgctgttctgtgatctggggttgatggttcgtccagcggctgcagaagatgaaaaagtgaacgtggcacttaacaaggtggtttcggtaagcacagaatatttggagcattggagcaaaaaggagcacttggttgatggtaaaagtgacacgcattgggctgctaaggctggagtgacaacggaacaaccacagtgggtgatgattgatctgggtgaagactacaatctgtccggagcggagataacgtggagagaaaacacggttgtgaaatatatggtagaaacatctactgatcagcaggcatggaccaacgttgctgatcaaaatgaaaatgccgatcccaaacagatcgctgatctgacgtttcagcagaatgatgtgcgatacatcagactgaacatctccttttacaagggtgagggagtttggccggaaatattggagttcaaagtgtggggagaagcagaaggaactgaaccagccaacattaccggatatgattcaatcgaagtgaaaacggtgacaaaaagtgcgccaattctgccaaacgaggtaaaagcacattacccgaagggaaaatcgagaatggtacctgtgacatgggatactatcgaccctttggaatacgcttctgcgggcgattttacggtaacagggattgtttatggtgcgcctccagagcctcagcttaaagctaaggtgatcgttgagggatatcgtgaagactatgttagaggtgtcgatatttccacgttgactgccattgaggacaaaggtggaaaatacgtggacagcaacggtacagagcgtgatttgctcgatattctcaaggatcgcggtgtcaattacgtacgtcttcgtctgtggaatgatccacagaaatcagggggatacaacgacaaggacgatgtcattcgtttggccgagcgggtgaagaaaaaaggtatgaagatcctgctggatttccactactcggatgagtgggcgcacccaggccagcagcttcgtcctaaagcttgggaaggtctttcgcccgatgagttgaagaaggccgtatacgactatacgtatgaagttgtgagagaaatgaaagcagagggcgccatgcctgatatggtgcaggtcggtaatgagatcaacagtggtgttctgaacggcttgagcagtgacgtggatttcgagcaaaatgttgcattgctaaaaagcggagttgatgctgtacgtgcagtagaaggagagatcaccgataacgcggataaggtgaagattatgatccatctggctgaaggcggcaaggtggatacgtttaaatggtactttgaagagttacgtaaaggcaaattggactatgacattatcggactatcgtattacccgttctggcatgggacatttgcggatgtacagaaaacgatgaatgaagtgtcagtcgagtttggcaaagatgtcattatcgctgaaacgtcctatccgttttcctacaaaaacggggatgcacacggtaacatcattggatcagatgaagcgcttcatgttgggggagcagacttccccgcaaccgttcaaggtcaatatgatgccattgccggcattatggacatgattgcgaacgtgccagataatcatggcgcaggtttcttctactgggagccagcgtggattccggcgggtgtaggctggattgcatctgaagggaatgcatgggagaaccaagcgatgtttgactacgatgaatttccggccaacggcgggcattcttatgaaggcagagcattatggtcccttgatgtgtacaaacgtggattgggtattctgcccgcagaccgccagcaactggatgcggcacttacacgagccaaatcattggtacagaatgattttactctggatagctgggtgactctagctccggcaatctcggcagcgaatgatgtataccaacaggcatacacgccgggtggggtaactcaattagatacagatgcagcgacagcagcattggaacgtgtgatgcagcagatgcaggttatcaccccgcagcttgacgagctcagagccaaaatagcggaagcgcgtacgtatcagcagactgactggtctgcggccacttgggtggtattgaccaaagcgctggaaggcgctgagcaggtcttgaatgatccaagagcaacacagacggatgcgaatacagcggttaaacgtttgcatgatgccattcaaggtctatccaatgtggacaaaacacaactgcaccagtacattcaacaaatgcagcagcagactaaatcttcctatacacgccggagctggtctgtattggaacagtctttacaggcagcgatccaggtccgagataacaatgctgttgtacagtctgaggtgaattcagcactgagtacgttgaagcaagcctttactaatctggtctctctagaggctttaacaacgggaaaaacggcaacggcttcaagcagtgcagggacaggaggtaatcaagccaactctcctgaaggtgcaattgacaacaatccgaacacttcatgggggaccgataagagtattgacagcttgtggcaagtggatttgggtcaggttgctaacctccgtaaaatcgaaatgtcgatgtggagtggcggcatcaaatatacgatcgaagtgtccaacgataacaaaaattttgtgaaagtagtggacaccacaagtgatgttgttgtatcaaccgcacctagccatgtacttccagaaggcacggagggacgttacattcgggtaacgattaaaacaggtcccacatgggtaggattcatggaatttgaagcatacggtacgttcccggcggacaaatctgcactgcaaactactgtagataccgctgagaaattaaaacaaaccgaatacacgacatcaagctggaatgtattcagtaaggcactttctgaagcgaaggcattcattctggatgttgaatcttcaacgcaagatgtaagcaatgcggatcgtgctttacaagatgctgtgagtaagcttgtacgtcaagatgtaacgcctggccctggccagccatcacaaccaagtgtaccttcacaaccttccaacccgggaacagcaccatcgacggggaatccttctgtaacaccaccggttggatcaggtactgtaccagagaaggggtcaataacggtaaaaggaacagcaaccggggatgacaagtattcgattcgtccagatgtatctcaattaactcaggcactgcaatccatggatgcaggaaatcgtacgttgaaactgattgcagatgtgcctgacacagccaagacagtcacattccaattggctgcaagtcagctggcagcatgggttcgttccgaggaggtgcaatccctggatgtagttgtaggacagactaccgttcgtgttcctctgagatcactcccactaaccattgcggagactgagggaacgttcgatatcgtagtggcaaaaggatcgacagatacactgactacatcgcaaaaagcagcgatcggtaatcatgcgattgttgatgtgaatttgttaatgaacaataagccattgcaatggacaaacagagcggttgaagttgctctatccaatgtggaacaacctaagaaaaatgatgtagttatggttgtacattccatatccacaagtggagaaatgaagcctgttacgtattccaagtacgatgacaagaccaaaacgatgacgttcaaaccgctggaatccagcagttatgtcattgcagaagttgaagtaccattaaatgatctgcaaaatcacaattgggctctccaagaggtgcagaacctatatggtaaagggattattacggggatgagcgcaactcgttttgccccgcaaggtgaactgactagagcacaatttttgcaaatgattattaaaggtattggtgatacacaccagccggatccatctatttcagtcccaacggatgtgaaggaagggcagtggtatgccaattcagtacgacttggaattgaaatgaacattattcaaggccgggcagatggaagcttcggagccaatgaacgtatttcgcgagaagacatggccgttatgctgaacagagcactgaaggttgtgcaacatgatcaggatgcgaccaatgctgtacaaggaaatatgatgtttgtagacaacaccgagatctcagcatacgccaaagaagctgtagcctcgatgcaacaacttggactgctaaatggcatgcctgatggcacgtttgctccgaaagaaacagcgaaccgtgcacaaggggctgttgcagtcgccagaatgatggaacaactgtattagagatagttagaaaagtccgcttttgattacgaaaggtgcctaatggcatcattaacacgcatgaatagaaaataacaaagcaggtaaagagatcggatcataggattcggtctctttattttttgtgaaaagagattatataagtttaactattgatttacacgataacggagaggacagaaaaaactgaaaaagcgaagcgttcgcctttatcaccggattttccctttagaaaagggaatcgaaaaaatctggggataacagcgattagaaggttattctgtcatcggagtgtcagtgtaaataatctttagttcaacttatatagaacggacccgctttctctaaataggcatataaacattttgttaatgtcgtattgacaatattgaatccatttgttatcattttgataatatcaaaacgacaatattaaagaaatggggaatgagctatgtttggattccgatttgcgaaatttcaacccagtgaatatgtcatgaaagtgaaaaatggtgaggtacagcgtcaaggtgtaggattgtctttctattattatgagccgaccacatcggtagtggttctacccgtatcctcggtggatgtaccgttcatgttcgaagagattacagcggactatcagacggttactgtgcaagggcagctaagctatcgaattgtggattacctgaaaataacccagagcctgaattacacgtacaatttgcgcaaaaatcggtatatctccgacgaccccggcaagctggatcaacgggtgatcaccacagcgaaagtactaaccaagaaacatctggagcaaatgccgctgaaagaagctattcaatccagtgaacggctggcaagcagcatgaaacgcgaggttgtgcaaagtgaagagttggagaaattgggcgttgagttgatgagtctatcgattctggccattctgcctaataaagagacgatgcgtgcattggaagcacaggcgcgggaagagattttgcgtcaggcagatgaagcgctctatgtacgtcggaatgcatcgattgaacaggaaagacgagtgaaagagaacgaactgaacaccgaaattgccgtagagacgaagaaacagcaaattcgtgagacccaattgcagacagaacgctcggtgaaacagaaacaaaacgagatggagcaggagcagcttcagtttaatacagcgatggaggaacgtaagcagcaactgattgagttaactattgctaatcacaatgccgaggcagatgccaaagcgtatgagattgctgccgtgatgaactcattgcaaaatgtacagcccaatgtactgcaagcaatggcgaatatgggcatgaattctgataagctgatcgcactcgcgttccaggaactggctgaaaatgcaggcaagattgggcagcttaatatctcgccggatctgttgcaaggattaatgtctcctgtgccgggcagagatcaaggaggtagagcgagatgaggctaggaagaagagagcaagcagggaaatcagtacgtcagcaggccacggcggatgatcgaatgagcgaacataaactgattctggtgaaacgccggacccgactggaagagctggtggttcgatataacacggtgcagcaagctcagttctatattgaacgtctgggcgcagacttcagtgattatatggaggaagaccgtcgttatcggctatctgtgcagcaggcacagcagcaactgggtcaattgggacgggttcagacgattgatcgggaacatgtgcccaattttatctttggagagcaggatatcgtggtcgtggttggacaggatgggcttgtagccaataccctcaagtatgtgaccgagcaaccgctcattggtgtgaatccggatccgatgcggtgggacggggtattattaccttttaccgtagaggatctcagcttcattgtccctgatgtcattcgaaagcaacgaaccttgaaagaagtcactctcgccaaagtggaactcaatgatggacagtatctatatggtgtgaatgatctgttcattggtcggaagacacatgtatcggctcgttatgaagtgcgtttgggtacatcgacagaacaacaatcctctagtggtattattgtatccacaggcatgggatcgacaggttggttcaaaagtgtgctggccggagccaccggaattgttggatcggcggcatggcagaacatgaattccgaagcagaggtcgctacagcatcggcatccattcatggaagcagtcaagatctgaatcattttaactgggatgcgccttatttatatttttcagtacgtgaaccgttcccgagccggacgactgcggccaatctcgtgtttggacagatccattcaaagcaacaactgcacattgtatcccagatgccagaggatggtgttattttcagcgatggggtcgagcaggactttcttgagtttaattcaggagtggaagctatcattggtttggcagagaagagggggcgtctcgtggtctaaacctttattttcaagccgtttccgactagaatgggtaactagatgtgatacactgacgtcaggaaacggaaagagggttaacgatgcagtcgatattgttggttgaagatgatgccaagttagcaggattactggcggcttatctgacacgaaatggattccaggtacagatcacagatgattttcgtcatgtactggatgaatttgtggaagtgaatccggaccttgtgctgatggatgtgaatttgcctcaatatgatggatactactggtgcaggcagatacgcacacattccatatgtcccattttattcatatcggctcgtgatagtggtatggatcagattatggcgttggaacatggagcagatgattatattacaaaaccttttcaatatgaagtcgttcttgccaaagtccgtagtcagctgcgcagagcctatggttcttacgctgctgttcagcaggaagtaacagtgaagaatggtcccatgatcctctatcctgagcgattcgtactggagtatgaggaacgtttaacagagctgacacagaaggaagcgatactggtggaagcactaatggcgaaggcaggtcgggttgtcagccgagaaaaattgttagaacagatgtgggaagatcagcattttattgatgataatacgttgaatgtctatattacacgtgttcgccggaagttgaaggagctgggtgcagaagagattttggagacggttcgcggagcgggttatcgtgtgttggatctggattcgtcctcacaggggaaagggaaatgagactgttcctgaaagaccaccagatgttagttggattttatgtgttacagatgctgctggttccgtgtgtctactggctttctggtgagggccgtccgatgaagattgttctctatggcatgctgatcagtactgttgtgctgttggtctatctgatcatacgttacttccagctgcgagcgtattatcgtctgcttgaacaaccacgaaaactggtaaacgaacctttccaaacgcttggaaattcggtcgtggcggaagccatccagcaattgttacatgaactggagcgtaatcggcagaacgagatggggcagttacgtactagcaaggaacagcaggtggtattcatgaatcgctgggttcatcagatgaagaccccgttgtccattatccaactgaccttggaagatgtggacgatgagacggctggcagtattcaggatgagctggataaaatgcgcaaaggacttgaaatggtcttgcattcatcaaggcttgaacagttcgaaggggattttcgtgtggagctgttgtctctgcatgaggtgcttcggagtagcattgcagagaaccgacgtttgtttattcgcagaggcattacgccggatatccgtatggagggcgaccttcagatatacagtgattccaagtggctacggttcatgttcacccagattttgaccaatgccgtgaactattccgatagcaaatcaggcaaaaaagtgatcattacaggctataagcaggaagagcgtacaatcctggacattcaggatgagggaatcggcatctcgtccgaggatattcatcgcgtattcaatccctattttacaggtgaacggggcagacaatatcacgaatctactggaatgggattatatctggttcgtgagatcagtgcccgcctggataaccgtgtggagttgttttcggagccaaatgagggaacgttggtcagattcagctggattcattcgaaatatccgaagtaaagagcgctttgcccatgggcgaggtgctttttttaatgcacagaagtgtgatagagaaggcaggggaacagaaccttaaacgcgttgtaagggaagtttaaggtaattcgatagcaccgttacgggaggtcagttaggataagaatagaattaacgtataaagaatgacggattaggagggaattacgcatggaaatgttacaggtatcaggactgaacaaagtatatcagggcaaagtgcagactcaagcccttagtgatattcatctgacaatcaaacaaggtgaatttgtgggtattatgggcccgtcgggcagtggcaaaaccacattgttaaacatggtctccaccattgatgaacccagctcgggcaaggtgctgattaatggaatgaacccgtttgatatgaaaaagaaagaacttgccatgttccgacgtcgggaactcggatttgtctttcaggatttcaatctgttggacacgctgacggttgctgagaatattgtacttccattgacactggacaaggtcaaactaaaggagatggagagcagactacatcgcattacagcgaagctcgggattgatcatattctggataaacgagtctacgaaatttcgggtggacagcggcaacgaacagccattgcgagatccatgatcaatatgccttcgattgttttggcggatgaacccaccggtgccctggattctacgtcatcccaagcggtcatggagtcacttgaacagatgaaccagcaggagaaaacaactattatgttggtcacacatgacccgcttgcggcaagttattgcaaccgcatcgtgttcattaaggacggaaaactggcagccgaggtgcaccgcggagataatcgacagacgtttttccaacggatcattgatactttatccttctggggagggaattcacatgagctttcctcagttcgcgtttaacaatattcgccggaatgggcgagcgtatattgctttttttctaagtagtgtgtttatggtcatgatattcttcgcttatgcggtatttatctatcatccatatgtgacagagttgccaatgggtgacacaaccgctacggggatgcagatcgcttcgattatcgtgtatgtgtttgcatttttctttgttatgtactccatcagtgcttttctcaaatcacggaataaagagtttggcattctgaccatacttggtgcagaacccgcacagattcggagattggtcattctggagaacatgttgatcggatgcctgtccattattgccggtatcggcggaggtatgttgttgtccaagctgttcctgatgttaaccactcgttttatcgggatggatgatctgcccttttattttcccgtgaaagcgattctgattacgatcggggcctttctgttattatttttctgcatttcacttttcacattggtttttatcggaaacaaacggacgttagaacttttgacgggaaccaacaaacctaaaaaagagcccaaagcttcatggttcttctcacttctgggttttgcattacttacagtaggttttgtggtactccgcaacgggttaaatggcggaacaatcatgcttgcagcagtaacagggatagccgggacgtatttcttctattcacaactttccgtgctcatcatccgtttattgaagcgtaatcgtaaaaccgtatggcatggtacacgtctgttgtggatctcagagatgagctataaaatgaaggataatgcccgcatgctctttatggtgaccgtggtgattgcgattgcttcaatgagtgcggttgtaattttgtcactggatcaagagaaccgggagcagtttacaaacaacgattttgcaattcaatacaacgtattcagaccaacagagcaattggatatgagcgctattgattcgaaacttgaagccgcaggcttggattatcagcaagtctatattgaatatttctggtctgattcagatcagagtgctgtctcggttatgccgcttagtcaatacaaccaatacaatctgacacaagggagaaagatgttccaattggataccgggtccgctgtatttgtggatacccgcaatgagaagggtcaggatcagataaagcgcaacagatttcgtaattatgcgaagggagacaagttgacgttgactctgaatgctagtccgctggaagttagggttacggatacagatatcgatccacagtttggaaccctactctatgctacaggtgtagttgtcctcccggatgagaagtatgaagagattgcccaacagatcaaagataatatgatatctggtaaatatctgtatcagatccctgcatggggtcatgctgtacctgatcgccactcttcggaagccatggttagcgatcagcttctatcctccgcggattccatccgaagcagcaacgcttcaacggataaccagtctggatatctgagtacgcggtacgataattttgaaagattcagacagggtacagcactctttacctttctgggcgtatttatcggattgattttctcgatctcttctgcaagctttctgtatttcagactgcataccgatcttgaagcggatggaaagatggtgcattctctttcgaaaatgggtctcagtttccaggagatgaaacgatcatccaccgttcagattgctattctgttctttttaccgatcggggtagccatcattgaaactttggtcgtagttaagccattcctgactgaattcggtattaccaattatacgatgccggtattgactgtatttggtgcctttgtacttgcacagacgttttatttcatcattatacgttcgagatatatcgcttctctgcgcaaaatgatggtgtaaccatcttagaaacaaacggtcatgaggaccgacccatgatttgttcattgcccgcatttcttgattcagatcaaggaaacgcgggcttttttgcgataagatgaatgtattcacagattatattatcgaggaggacgattatcatgagtatcacgtcattgcaagaagtcaaaacattcagtgaggaccgtttcacgaaacgagttttattccaacagggtggtggagtgacctttgtacttcattttctgccaggtcagcagcttcccgttcataaacatccgggcacagacgttattttgctggtagtcgaaggcacaggcacacttattctggatggaaaagaacaagaggtgaaacaagaggatgtaattcattgcggcggtgaagtggagtttgcattccataatacaggagatcaggaggtccgtttgttcgtggtgttaaacaaagtgccagcagcatcctatgcaaaggacatctaacatcaaggaatcgttagaatgattcactgatcggtaccaatataaggggaactctattctggagtttccttatttattttttattcaagaatgccttgacaaagtgtggttcccatcgcaaaacaaaaagcatacctgggtctgagaacatcagatttaagtacgcttctttgtattccgccagcaacttgttcattcatccggtctatcgtcattctgcctagaagtatcccagcatttccttggcttcattcgacatcagctgtggagaccattgtggctcccacacgacttgaacatcaatatcggtcttatttgtattttcctgcaaaacccatttcaccgcaccgacaattgtatcgtgcagcgggcaacctggtgtagtcagcgtcatccgtacatgtacccgttcaggctcttcccttacttcatacaccagacccaggtcaacgatattgacacctaattcagggtcatacacttccttgagacattccagcaaatgcgtggtttgttccatcatgttcactctccagtccaccttattaatgttaacgtctgaataccaaagcaatatttgttatataaatgatggagacaagagacagtatcgtccctccaaccatcatgacctcagccagattaatcagaattccactgataagcaaaaggcttccaacgaccatggcgagcataccccaattgacataccgttcactcagcatacctgccatcagcggtgttccgggtctgcctgcctgcttgccatatttgtgggtccaccatagaaaaggcacgattttggaggcataaccaagtatggtgagagacacccagcccccgagatatacccatccagacagcagaacaacacgtggatggagcagcaactcagtcccttgcgaggaatagatcagtagtgcaacagcatatacagcaaacgcacggcttacatacacagaccagcgaatgcccggacctgggttacttttgtgccgtttctcctgaatttgctccaagtgatacacatagaagagaagggtggcggttagaagtaagagcgcaagccagagcaatcctcccttgatacctgtcagaaatgcgataacacctgtaactacagctgcattccacagaaccaggaccactttttgcagtcgaatggaataatcgtgggacaggtagaacatcggaagcattttgtaactgaagccggtaattaacatgccaaaccagcctagtgttcccatccagatatgtgcaccgaataatcgttcatgcagaccattccaatcaccaaaggcaaaattcagacccatcagcataccggacagcccggtaagaaccagataaagacaggaacaagctgcgctgaccgttaccggattccactgtgaggcacggaagagggtaacgcccatattccacccgaataacagaatgcccgagagcgcgagtgtagcagaaccggcaatccagatgacatctgcacgaatgaagccgtataacatgcccacgattccgatactgaacaagaaataatgacaataaccaagaaacagactgtagatatgcaaaataacatgtatcaactgataaacggcgcccatagccaacatggttgcccaaccgagtacaaacagatgggcatgaaaccagccttcaggtcctctgagttcatcaccaagccagcctgtcagcgagagcagggagaatgcgtgatacattacaaatccaaagatgcccgtgatgataaaaagaaacggcaacctggacatggcctttgcctccttaccctttttcaattctcactttggcagtaccatcggcttgatcctcaaccgtgaaggggcaaccgagattgtttaactcttcaatcaagaagactggcacacggtcattatgaatcagtacgacttccccaggtttgcaacgttccagtgcggcaagtgttcgcatcatgggttgtggcggttccaatccgcgattgtccagtataacgttgggcgcctgtagagattcaaagttttcaatcgcaacagcttgctcctccggatggcctttgcatgaagctgattcttcgtctgaaccgggctcagaatcgacttccgatccagataaaaccattgcagataatgctttggcaccggttttattttttttgtgcacaaacgtggtaacccagtgatctgaaccttttcgttccgatgtgctggagtatcctttcatcttgagaataccgagcaggggcgttggtttgaatggagcatggagtacaaagacatcttcatgtcgaaggcctttgaccgtgtccatgatcagttgaaacggctctaactttttacttagatgaggacgcacatccaattcgacaatatggacatcagatggagacatgtgcgttcacatccgatcctgcactagctacatccgcctgctgtaccaactgcagagatgattcatacagggcggccattccaccgtacagcgcatagaagaatgactccggcgcatcgagggagaaggacagataggctttggggtccatgccgagcaaacgctcaaaaagtcttgcactgtcataggcgtaaaaacagaaatgagtatattcgaacacaggcattttttcgtaaatggtgataatctcttgcgcatattccgcttgctcacgctgtgccaattgaaccatggttgtggcgtcttccagccgtagcgtgatgcgaagtgtagtatcgtcaatgatttcaacgtgcgccatagccgttcagctccaatctataatttactgattttgacttggaaggttgtaggaccctgctcaatatactcccagttgaagccatcgggatgtgtggattgaaactggaatcgaagaggctttggatcgtgatcgttaataagcaacatggattcctgtggtcgcaaatgatcaaacgtttcgaaaataactttatgtttcaaatgcggtggatactccgtggcattaatggttgctgcgtatgtgttcatgtgtcattcctccaaatagggatagtgtggtgttgcaatttgattatagaaaacgtgaagggggggctgtgtgagcctgctcacacattttttaatgtcatagtctcgccttatttgagtcagaatcctgtatggaaatattgccatgggcaagccaaagctaacaatatcctgatacgcatattgctaattgtgaatgcgaaagagaccttaacattgattacggtcgttaaggtctctttgtgcacacacagtttaatgtaatagcgtgggagaaaacagtgtagctgggtgcagggtggtcacgtatccctttgttccttcaaagcttgcaaatcatgaatgatgatccggctgcgatccacttcgagcaaattctcttttgtaagctggtttaaaagccgattcgctgtttcccttgttgtaccaatagaattggcaaactcctgatgtgtcatgggcaggttgatgataatctggtctccatgcatttgtccgtgctgatctgcaagcatgagaaggaaggaaagtacacgattgcgtacatcctgaccagagagcacctgcaatttatcctgtaattctcttattttatcaccgagcacacgcataattttgatcgcaattgaaggtgtgctcagcattaatcgttcgaaaagtcggacaggtatggctagtagttcggtaggggtaatggcttctgcggtggccgggtaagggtgcgcattaaaaaagccggtgtgtgggaacatatctcctgttttgaggaaagagacaatctgttcatgcccgttctcatcggttttataagcctttacaatgccggtacggataaaaaagacagcttctttttcgcttccttcgctgaaaataaccgatttcttctgaatacttctggaaatggcgatatcttcgacttgctttaattcctcggggctaaggtcctggaagatggggaactgttgtagaaactccgttgttgtatctttgtttaccctactcatgagaatctctcctctctgtgttcatagttctgaacgacgacatcatttcatcataacgtgatttttgaacacatcaggtgatatagatcaccgtaaagccacatcactgtttttgattactcaacctgggttaatggaatgatagaatatgattgaacaagagaggggtcggcccggatgtggactgcattcatgtggggcggcatctctgcctcagcggttgtcattggcgcactcgcagccttgtttctaaagattcccaaacgagttattggctggatcatggcttttgggacaggaacattaattggtgcagcgacctttgaacttctcggagatgcgctgaatgatggaggaataatacctacagccattggatttacggcgggtgccgtcgtgtataccttgtttgacctgctcgtttctgcaaagggaggggcagggcgtaaacgttcggcaaattcgggagactcgaaccaaagcgggcttgggatctttgcaggaacagtaatggatgctatcccggaatccatcatgcttggtgccagcttactggccggtaacggtgtcagtgtggtcctggtagtatcgatctttgtcagcaacattcctgaaggtctgtccagtacggttggactacagggcaaatacagtcgtggcaaaatcatattaatgtggcttagtgtactattgatctccgcgattgcagcactgggtggatatctgtttctggagcagcttccagaggagatgggtgcagcgattggtgcatttgcaggtggcggaatcattgccatgatctgctcgacgatgatgccggaagcctttgaagagggtgggccaattgtgggtttgattgcatctatgggattgcttgtgtcgctgttgctggatctgtagatgacagaacaagcttccgatctattggttgaatttatataaaaagagtatccgaacagagtggtttctgatcggatactcttttttgccaaaacagcttcctcgcatccgcaagctttcttacccagttcattggcttcgggcaggcgattcaattttttccctaagctgctccaattgcagaataaggatgcagtttcctgtaacctgaagcagtccctgagtttgcatcatggcaagtttacgactaagtgtttcgggtgtgatcccgagtaacagagccatatcttttttgaatacaggcaagcggatctcatgttttgcatgatttcgggtatggaaatacaaaagcaacttggcaatcttctgttccgttgtcatcgcacttagcgagctgttccattcatctgtttcacggagcagcttggtaatggcaagcaggaaatgataagcaagcttcggatcgtgttcaagtaattggtcaaagtcatgcttgctgatagagcagatggccgaaggctccagaacttcggcgtttgcgacatgtggtttttggtgtaacagggaatcttgtccgaagaaatcaccgggaaacagaaaccgaataatatgttccttgccattttcattgtatttggataacttcacacctccctgatgaaccacataaagcgtatctgagcgttctccctcctggacgacaacttcgcctttgttatatttgcgggtatgcagaagggagatcaacaagacagcttcggatggatcaagatgctggaacagagatactttggagaaacaggcatccttcgcttcgtgtgtacagatcatcgtttaatcacctcgaatggttcaggataggtatagccattatctattgtcatgtctcagtgagacatcgcgggtccaccatgatcagttccatccttggtcacacgcagaacagcggcagctcctttggctacatggttgaactgatgggttacaatcgcataatcaccttcttcggtcacggtgaactctacgacagctccaccacttgcgggaagcataaccgtctgtattccatactggatgttgcgtggattcccatcggtatacacacggtccataatggtacccacaacgtggaaggatgagacttcattgggtcctgcattactgacatagattcgcaccgtatctcctactttggctaacaggggatgttttattaatccataatcattgccgttaaatacgacataatccggttccccgttcaaaaaagcttcataatcatgctctttataccattcactctgaacaagagtatactcacggtctaccaagtgatcggaagggtatcctgctttgggatcaacaataatcatgccgtacatcccgtttgcgatatgggcaagaaccggtttagttccacagtgatacatgaatacaccgggtgaggaggttggataggtgaacgtaccttccttgcctggcataacatcaataaatttgctgctgggagcagcatgtacagcgtgaaaatccatggagtgaggcaggctggaatctttatttttcaacgtgaacaccatggtatctccctcggtcactcgtaggacgggtccggggacggtaccattaaatgtccaagcgttgtatatcactcctttggagatttcgacatctgtaacctgggccgtcatttcaatatataccgtagtaccttctctgcgaatgatcgggtccaccgggggttgactgatcgcagaggaggaggaggaggaggagacttcatcgtggtgaacaggtttaaccgtgtcggttgaactacagtgagagagagttgctgtgaatatagcaaatacgagtgaccatttgtatacattcagtaaggagaacatagttgcacaacctttactcaagtgatgtttttcacaatctaaaaagcaggttttctttcatttcagtagttattttgttatagattacgttattgaggtggagacgggtgtgatgaggcacacacttgggtatgtcgtattagaggcatttccaacaatctgtcttcaattgttgtgctgagcaacggagtttcatataattttagagagatggattggtaaatgttgagtattttgacgctgtgtatgtcgtagttttagaagaaaggtggatacaggatgaaacgtttcgaagatgaaggtgcgtataagtatagtttctattcggtccttcgacggggagagcggattgatgtgaaatgtcccaaatgcggtgggcacgcttcgattgatcaacggaatggtcaactgggatggaagtgttacgaatgttacgctcaagcttttgaagaaccagtatatcaatataaagccaaggggaattgtgctgtatgtgaacgttggtttaacgtggaagtcacagacgagaagaagacgtctcaccgatcgacgcatgtggaatgtccgcattgtagttctgtgaatcaggttgaattacacgccaagccgacataccaaaggtgttttttcgagatttgtgcagggaaagatcctgtgttcgggctggaattatacttcctggataatttcagaggaaaaataatatgggctgtgaatcgggagcatctgaattatctcatcgcttatgtctccgcagacctgcgtgtaaaatacggcaatatgcctatacgaacggcttcacatagtattccggcttatatcaaggatgcgaagaacagggatgtagttgtgcgtacactgtcgaagcttcagcacaagactggatgagaatggaattgaagcgttaaagccgcaaggagagaagaaatgaaactacgagttaaacttactatttttgcagtcattctgggtatgttgatgattccggcttattttattttacagacatttggtgtatttcaaaaagagacagtattatctgactatgctctggccgttgatgttaatgggaagtcctatggggcttggccgctgattaacagttttgcagcgatggacaaagaggaagataaccgtcagttttattaccggattgatatgaatcatatccaatacctgtttaatctggcttataaggagtatgatgtgaagccaggcggggacaatccgtatctggctggtactgtaaactatcaacgtacagatcacaactatgtacagaccgagagacagtatgagaacgccaatgatttcacaacggttttgaatctgtatgatcaggatgggcaggtgatctacacctacaataacaccggcaagggagataaacagctggtagaatccatcattcatcagggaatgagccgtaatagtggcggtagtagcgaagctgctcgcgatccttatatcaatattacggcgttattccgtgacaagctgaacatcgatgtgaaactgacggtggatgaggaacacaaagtagttactattcgaatgaacaaatcggaggcgagatgatgaatgagtatggtgtacaacacggacctgtttatctggaaggattaattaggaaggaagaggacataaagtccgatgaagtggagtggaaaggcaaacttcaaacgagtgatggtcatgataaattccatattttttattatggtgacttaaccgaagatgatctgattacctggcatgattcgacaccgcttcttgtatatgcggaacatacggtcacgggtgagcgctatctgctcattgataccgccaagcaaggatatgatgccatgttatgtgagacctattcggaagaagcactacatgacagaccccttcgtccttacctggatgttgaaggagaggacatctttgaagtagagttgacggcttactacaatgtgccttgggatgaagagtttggcgaagatgtagatgaaaatggtgcatatgaactgattacgggagagcgcatgcattttgatcaggtcaagcgtgatggatatgatgcctttgcaattcgcattctgaatcgtaaaggagtatggactgaaattgtacaggaagaactggcttagatcctgaaaacgaatgaaccaaactgagatgggagatgtcgacaaatgtatattgtatcccgtgtacttaagccggttccaacagaggaactggatcactttgaacaacagcacggcatctcgctacctttgtcataccgcacctggattgagcactacggggaaggtacatatacggggtggatgaatgtgcagagaccggacccagaagtgttgaagccttttgtggattatgatttttggatacatacggatgattcgcctataagtcagcatcaacttgagcagtgcatctccatcggcagttctgtagatggagatttccttgctgttcatccggaagttgaggggctgttgtggctaccgcgtcatgatgaaaatatcaccttatggacatgctcggagactgaatttggcgaaacgctggaccggatctattgtgggtattaccatcaggataaaccaataacgccactttattttgagccgtggaatgagctgcggaaacatacgttttaccatttttcagggacggaacagggaagcaccatgaaggaactcgccgatacatgcaaaacagaatttaagtgggatgctgtgttggagaatgagtacatgtgcaagatgttcatggtgtcgatgggaggatatttacgatttaactatgcagctgggagagaagttgccctgttctatgaagaaaagaatggtgcggaggaggcgacggataacgaaatcagtatgttcttgcaggcacatcattgtacggcatatgaataggggcagagtggagggacacctatgagttggttaaaggaagacattgcggaacaatggcgcaatgaaggcaagcgttatgcaagggatgtcaatgcatttgtccggagaagtatgcagggagagcaaccggatgaatccgagttggaggtagactccagaagcggaatgagtactgaagtattccatatggtgagacaggccaatctccatggtgatgtggaggtgcttcgacatgagctacccgcagcgacgtggccattgaacgaggcgtttcaggcttccatgcaagcggtcaaagttgtaggttatctgaacgaggaaacgattgtatgtaatacggggattttcacggagaatagtcagatatatacgatggatcagcacggatggcagttgatctctccatatacttttgcaggttgttcatcggatggacttgactttgcgcttgcaggacgggatgggattcgtattattcgtcagccagatcgcaggttggaaggacaggagatagcgacatatcaatgggaagatattcaagcccggatacagtcggcattacctcggattgaatcacttgcggactgtgagcatcccgaacggacacttgaaggacttatacctatcgatgaaggaaaagcactactcatacattcaagatacgggatatatcttgtcacacaagcccaggtgaccttgcttcatcccgatctggcagagatcgaagagtatgagctagaggatacacagatagatatgggacatgcagctgtatcaagggatggtagatggattgcctatggcagccaaggaagcaatcatatggtgatggaccgtcggctgagcaagacatactctctctatccagaatcgagctaccctcattatgcagcattcaccagtgataaccagactgtctggtttaacgcatgtcatttctataacggggtcacgatacaggtcccgctggaatcaattgcaggcaacgaaacgaaggaagattggccgataatggatgagaatgcacgagtgtatgcagcggtggaaatagaggcaggcatggtgcttggggatgcatatggttatctatattgtgtaaatggcgagggtaaggaagtatggcgtcattttgtgggaagtaccatctattctctcgccgtatcgccagggcagtccaagctggcagttggcacatatggtggcatgctgcatgtgcttgatctttgttccacagaaatggacgagtacgggatcggtacaggcactcttcgtgagttggagcggtatgtgttgtggcgtggagaagaacctctgcgctggtgaggtagcattttgacctagttaggggtgaagggatggaacgtgaagaggcagtaatgttattaaaatgtcactccttttcttatgatgatctgagtcatcccaagatggagaacggttttattggcagtctgcggcctttccgtggacatttgattgaggagaattttcatgagttgatggagatactgcgtgttctggcgtccgaacttgcacggccttcactggatcgggaagtcatggcatgtctatggggaattactcatatggcccgtgcttgggctgttgaacctgagggtatgcttcgcagcaacaacctcatttcggacgcacaggtggcgttgatggaacaatggcttaatttgttgtcttacgcagtcatgattctgattgaaggcggcggtgaggaagaagcgttttggggatatcatcaatatctacaagaagagaagaactgagataggggaggtgtggtgagattggagccgaatgtatcattaaacgtgctaatggacgagctgaatcgcttgctgggtgagagaatacaggatcaagagattcgccaattgtttgcagaatatcaacatcgggaaggtgcatccgaggaaagtctggatctattcgaaaaggagtatggcgtccggctgcctggcgattttcgtaccttttaccaaagaaaagacggcagtggctatgggttacatgtgctttacccaggggatgctgaggagggtcgatgtacgcccttttatctcatgtcattggaagagattcgagagaccaaacaatacttttgtgaagtagatgagaagcttgaagagtattattctgccgaagagatcagccagctggacccggagatcaaaccatatttgttccataaaccatggattccttttgcaacaattgcaggtggttcactgtatctgatgctcgattttgatccaacggcggaaggcacgtatgggcagattattatgtacgtgcacgatccggactttgtttattaccttacacctaccttcacggatctcctcagcatgtcgaaccgtaatctgaagatgatggatgagatcacttattaaaatcctgcacgattagacaattccttcaataataaagaagctgccgaagcagctcctttatctgaacaagtactttgaatgagtctaatgattaccactggaagaaacgatgtccgtgaaatcctccgcctggaggtcctccgtgtccacctggaccacccggcccgcctccatgaggtccgcctggatagccacctcctgggaaatgaccagggtgtccaccggggtaaccaccgccgtgatatccaccatgccaccaaggaccaccgatcggatatggtagtggaacaggaacgatgggcgggtatggatagggataagggtaaggatacggtgggggtgacggataataagggtaaggataacccgcagattgcggggatgaaactgaaccagggccgtatgccatgtaataagcctccaatgactggattgatgatatcagcctatgccacagtggtttcagatgatacagcagattgaagattgatgaataatgagtaatgagggggaacatatggtagccgtagcttttcacactgatccaagaggaactgcctatgaactgttaattgacgaattgatcgagaagacagaccggtttatgctggttgatagaaagtatgttgaggaagctacacctgaaagagttactacagtgttacggagattggatccgtatttgattgagagcagtacgatggaagaaatgatgatgaaaagtggcgccatgtattcagaggggatttattacatatatcgttgcacgccggaatcagggcagatcctcaaggaggaagccaaccgctttcatgactggttatatccctcaatgccagatgatctttgttttttgaacgaggatggaagtgactacttctacactgttgctcatgagaatatgtatggcatgcatattacacaagaagaagcaattgagctaatggagcgaatcactgggttattttttagattagatctgcatcaggacattcattgtttactggacgatgcgattagacatcagacggatgtgctgaatattaattcacattacttgaaagagattccggaacgtattcgggaattaaagcacttgaaacgtttgacgatttttgagcaggatgtttatacgcttcctccagcccttttcgaactgacatcattggaagaattggagatcatgacggcggatttggaaggtattcaccaagacattggaaaattgaaacaacttcgagagcttagaatttattgcggcagttcttatcatgttccgaccggatggaagccaaaggagaagtcggatcttggtctgaaacatattccagccgagattggtgaattgagcgaactcgtaactctggacatagggtactcgggtatttgtgagcttccgcctgaactggagaaattaaagaaactacgttatttgagtgtaactgatggtttgatcgagggaatgccagagatggtcaagcgaatgagttggcttcagagtgtaaatttgaacagtactccattagggattagttgtgatgacatctccgacgaagcagaactttaatagccaatgagccctgctctcgggatgtccgagtcagggatatttgttatgcgatgagaacttggcggaaatgggctcacgtatctgggcgctgggcataagctggcatataggttatgacctaaaccgagagcgaagggcaggcgttttattttggcaacctcatacatggattacactttaccaaccaccgaatttacttacgatttgagcaataacccgttattcaagaaggatgagaacaactatattaacgctctttccatcaagcagttaaacacactgggcaatgtttctttactggatattttcctcaacacgggcaatgtggttgaaccacatacgcatcagaatgcaacggagttggtatactgcatcagcggtgcggcagttgtttccctcattaatccatttaccaacgagcttcttcatttcccgattactccggggcaggtggctaacgttcctcaaggctggtggcactatgaagtggccactgcagatcacacgcacttactcgcaatctttgatgctccggttcctgaagcgatatttggctcagacaccttacgtcttacacctgcaaaacttttggcttatacgtactgtctggatgagaaaaaagttcaagaagcacttgctcccattcaaaaaacagtgattattggcccgccggcagattgccagccttcaattgctcctgcctctaacagtgctccaaatgtgaatcatcagccttacgtaatgcctaatgtacaacccaatgtacagccaaacatgcaacccaacacacaacccaatgtacaaccaaacatgcagcccaacaaccaaccaaacatgcaaccttacgtaaaccgtcttccgtactggggcacttgggttgatccacgtattattcatgagccgggctgtccgtattatagagagcttcctatgaatacgaataatcaagaggaaagatgacgttcctgaggcgaggtttatctaatacacataagtattttagttaaattaggtataacaaaagaagcgtccgcaaaggaacgcttcttttgttgattaaagttgtcttcaaacctgctgaaagccgatgcatacctgaacgtgtccggagcatggagtgctaacgaatcgtaggcgtcttaatcaagggtttgaagcgtgcccagaaatctaaagaatctgtgacacgttatatcagaataaacagccgtatgaagtgtttttatcgggggattttgggaaataacgagtctgaggttccttacaattttaaatgaggacctagaggccaaataagatgtcctgagttcctaagaaaattttcaacccattccccagagaccgcaggatagtacttcaagactttttaggcgcgacatccatcatcgatagcttgcctgagattgaagaacacctacataagttcaattaaatattcattagttgaacttatatatgatttaatttacgatgtgtaatttcgtcccaagccaagctccgttaacaattgacgataagcaatcgaagtacggtctgcgggaatatgggcctcggcatgcagatcaaggggcagatcctccggtttctgtgactcgaccatctcgcggtcttcttcaaatacctgcaagttgaacttgattgtgtcttcaatcggagcgtctttgtcaaagttgcgtgtgattggacagaataaacgtgtataacgggcagagattggcgaagcacaattcagaatattcagcttgtcgtctcctgggaaatgtaccgtaagagaagccgcaaaaggtgggaacactcgaaactcacgcagccattggaaaccttcaggtgcaacaagatcttgccctttgccatagttacttacagtactccaatactccgccagtaactcattaccttcgcgtttcactttgtattgggggacttcggtgttgtttcgatcaccaaacgtctcggtatgcacataggcaaaatgggatacatccaggaatccctccatttgtcgtccagaggaaccagcaatgtcaaagttgggtggcagaatattgatataatccggatcatcccatccagggaaggaggggatctgttcttccgttcccgccaaagtggtccagatcaagccataacgttcgactgtcgggtacacgataagtttgagcttagtcgagatcttggagcttgggtgcgcaggtactgcggtacattttccttcacaattataacggaaaccatgataagggcagacaatctcgccattttctacccagcctttactaagtggggccccgcggtgaaaacaaagatccttggctaccacaatctgatcattactgcgatagagaaccagcttcacatcgagtaattgagcagacaggggtttgtctgttacttcggttgcttgggctaccgggtaccaatattgggataatacatgccagtcttcagcggtgaacgtacaccctctaggtaattcggaggtcattgtatgttttgcgttggaagttatcataggaaacactccttgctgatatggataaacgattctctttttaatgtcagaaaagttaacttcattagccgtatgttactactcttttggtcaaaatatcaatatatccaacctgcttttggttaaaatcacaaacgctacagcaaaaaccgtacatgaatacggaaaaacgcggatttttcttacgttagatgttaattgtagaaaagagaacaacctttcagtatgtttttccattactgattattaactccatggaggttgtcctgccatcagaatctaagtgtgaatattcgttagttgagcaactattcttgtgggcataaaaagattttcgcaaagaatgtcacagatcccagccttcatttgtctacagtatgtaaaccaaatgacggaggcgaatgaaaaatgaatttaagaacgaactacagagtagcgagtccaggtgcttttaaagcgatgatggcaatggagcaatatatatccgggcaatttgaaaataaagtattgtatgagctgttaaaaatccgagtgtcccagattaatggctgcgctttttgtctcgatatgcatgccaaagatctgatgaaactgggagattacgcggatcatattcttttgctaagtgtgtggcgtgaagtgcctttcttcacggatcaagaacgtgttatgctggagctggctgaggcggtgacccgaatctcggaacatggtgtaccacttgcgttgtacgataaggtccgtgaacatttcagtgaatccgaactggtggatctgattctggccattaacacgattaataactggaaccggattgcgattacaactgggatgtatccgggttgctttaactaaaaatacacgcaccatgccaggggaggcttcttatgaattctaatttccatgccaatgagccagaagtgtcttctctggacgttggtgagttgtatattcgttataaaaaatatgcattttcaatagcttaccgcatgttgggcagtgtggtagaagctgaagatattgtgcaggattgttttgcggggattcagagtacgtctgctcaggatattcgtaatcccaagtcctacatcgccagattgattgtgaaccgaagcttgaatctgctaaattccgctcgtaatcagcgggaaagttatgttggtgagtggctgccagagccgatcggtgacagtgaagaggcgaacatgccagaggaaacgatggagaaaaaagagctgatctcctacgcctatctggtcatgttggagcgtctatcgcccatggaacgggctgtttttgtccttcgtgaagcgttccgatatgattattctgaaatagcggattggctgggcaaaacggagagtaactgtcgtcaaatctttagccgcgccagacgaaatctgcctgaaagacttccgccgatcgagcagagtgatgcggatatgatagccaaaggtgaattgctgagccgttttacaacggctttccttcgttatgacgtctctgccatgctggagttactggcagatcagcctgtatttacagcagatggcggtggcgttgtgcatacggttatgagaacaatgaatgtgcacaaaggtgtgcttgcactcctgacctcacgtcgagtccttacacgattgcgtgaaagggaatgggtaccgatgtggatcaatggcgaacttcaactcgcgttgatgaaagaagggcagttgtccgaggtactctgtttggagttggacgcttccggagagcggattgagggcgtgtatctcgttgtcaatccgaacaaacttacatcaatagacacttcaactctttgatccaaacgtaacgacttgatatataaacttaaaagcgacaacctctgtcacgaggattgccgcttttttggcattcacattttgcgattcagcatctgattattcacggacaaattgttgttgaacaggttcaatgattgctctgacttcaggtgtaagctcatcattattctgattgagaaccagtaaaatcttttccatagtgtccagaagaacactctgcgtatcgggctcccggtaagccaaagctttctcgtaagcctgtttcaccacagggtccatggtgcgaatttcttcatccgtgtaccaatcataagcaggcgtgttgtcacttccgtaaaacagataatccacaaataacccttgcttcactgctgatgtgcgattggaattcgggaagttgttcaaaaaggcttctttctccaatgcacgctggattaattcgttccaagagatgataatgcccccatctgaagtcgtcatttggttggactcggtagccataatattaatgtatgcagcaatatcagccttaacaaaaggtttgaacttttgatatatctcataattgatgatggggtaatacaagccttcactggtttccagtttgaacccgagatctgaagcttcctgcagaagcttcttcacggtcggatctttaatttctttgagcagacgactatatgtaagcttctgttcgtaaccaagttgttcatgggcttgagatatggcctgttgaaattgttccgtatacatttggtagtccatattagccaatttcacgttttgcatgttctccagttgcagcgtcattagtgtggcctgccaaggtccgactttatcgatatgattcatcaggtatttacgcgctttaaccagactttctgtggacttcactgcttctgttcgataggtttggaactgatgatacaccgctttggaagcggggacaggtgcagctagtgttgttgaaggtgtgagtgttgtgccaatggcagtacagccgagagccatagccagtaaaccaagtttagcaggttgcttccatctcatttgtatacctccccattaatgaagaaaaagccatttgaattctcgtataacggcatttcaccctattttatatgtatgatccgtaagttgaatatgtacgggtttgtctttgattaaaccagtttttggtaaccaaatcaagagtcttaagcaggaaatgattataaataaccaaagaacagcccctaaaacccgcatgggttgaagagactgttctggggaatcggactttattttctaattaatgaagtggtttattgttaataggcatctgaggtgctccggttgctggaatgtatgcctgaagcatctgttgtgtatcacttggagtgagttgaggtacttgataataggcgtttttattctggaacatgaaaatttcataggccatctcaataaaatgctggatctgcgaagcgatgactcggcgaaccgttccatttgtgatctcgctacaggacatgccgagcagactcgcatgtgacttgatcagtcccagcatatgaccgctaatcccgacatcctttacatcggccaagctctggtttggctttttaggtgctgatggcttaaggccatataccggtggtaccatgttggggatcatataggtagctgtctcttgatgaggcttctgtccggatgcaaaacactctgctgtcagattgtactgggataatatgaaattgtactgccggtcgagaatgccaatcagttcctggctctgcacaaatgtacgaaagatcatgtattgatccaggacgttaatggtggaggacagaatctcatgtacatcgaacatctcatgaccgccatgattcatgttaggggtgacatttggattagcattcaatgtgggttgtactaaattttgagggtgcatcgaatttggattcattgtaaatttgattctcctttggtaaatggtatgattctatataagctgaacgaaagaatatttacacttgccactccgatgacagaacaaccttccgatcgctgttatccccagatttttaattcaattttacaaaggtgaaaatccggtgataagcttatgcttccgaagtagctttcttgtagaaagcttttagcgaacgcttcgcttctgtagtttgtttctgtcctctgcgttcttgtgcaaatgtatagttcaacttctatagtatgcttgtagagtagtaaacttatgtaatatgttaggaatataagcacaaataggaataggcatggtggtggttaagatggaagagaccgattggggtttagcaaaggatttgttcgtcaaacattacgggagcgctatacagatgcatcgagaaggcgtgtatgccgactataagcgatgggacgtaccccaagagttagaggaacaatggataggagagcgaattcaacaattaagttccgagctgtctatcatgaattgggatgcggtggatgaacttgcgttgattgccaaacatcggacagaaccaagtataattaaggccattacagcatttgcttcaagacaattgaagagtgcggacagtatggttcgtctcgtgtatgctgaacgtctgattgagctgatcaaacggtatgaatcctctctgccaatggacaagttacgagagacctatcaactgacgatggatttgctggttgatgtggcgactaaaccgttggtgcttgatccaggccatgaattacagcagtatggattaaaggataaacgaggattgaatttgcgtgttgaaaagaataaagaagaaatcatccgctattttcgaaactaattgaattttatcaagtgaggtcagaatcattgagaaaactgaattatattcgcatatttattttccttagtgtggttactatagtaacgcttggcttgtactacgtagccgcagattggctggatcagcgttatttccgcttcctgatctggaatctgttcttgggctggattccttttgtgttctcttatgcagcctatcttctaagtgatgtgaaatggaaaggtgccgcatggcttgcagttgcaagtggtctgctgtggttgttatttttcccgaactcttcttacattgttacggatctggttcatctgacagcgagaagttcccggtattatggtgggaacggggtggactacacgtattggtacgacttaagtgttctattaatgtttgtctggactggtcttctgcttggattcctgtcgatgtatcagcttcaggaagtgatctatcaccgaattggacgctgggcatcctggatctttgtactggttggcagtgctttgggaagttacggggtattgcttggacgtgtatatcgactgaatagctgggatacactgacgaatcgcgagacgctaattgaactgatgcacgaaagtgtaagccgtccgtctctggcgttttgcctgttttttggcacgtttatcactacaatctatgccacattgtattatctgatcaatacgagggctccccgtgaaaagaagaagagtgcaggaagtcccaactcggacctgcaagcgttacgctaacctatgttgttttgaggagatagacttacggtaaaacgagtggaacaagtgattgaacagcatttgagcatgctttgtcaaacttaatcttacgttgtctgaagaagggttatttccttttataagggagtaatccttctttttatgaaaatttggcaggtatgcaggatatgacgaagaattaagaatgagaatgtgatgaatacatagacaagtaggtgaacaacaaaatgttgaatgcagtagagctgacaacaaaaatagaagaagtcatggaacgcgtgaatttttcgggtgttgtattactccagcaagccgggaaaacccttttgaatatgaaacgtggttatgccaatcgcagcgaagaactggctaatcaggtggatacacggttcggtattgcatcaggatgtaagatctttacggcagtgagtatatgccaactgatagaagcgggtaagttgtctgcggattccaagctgaacgatgtgttggatgtggagtttccactatgggacaaaggagttaccattcagcagttgttaacacacacgtcaggcattccggattatttcgatgaagaagtgatgaatgacttttcagaattatggaaagacagacccgtctacgcgatgcggcgtttaagtgactttctgcccatgtttcagcatctgccaatgaagtctgctccgggtgaacgttttcactacaacaatgcgggtttcattgtgctgggacttatcgtggagcaacattcaggactgtcatttacagattatgtggaagagcacattttcaaaaggtgtggcatgaaggaatccgggtatttcttaacagatcagctcccccgtaacacagctttagggtatatcgatcatgaagatggctcttggaatactaatatgttctccattcctgtcaaaggtggatcagatggtggagcctatgttacggcaccggatatgattcgattttggggtgctttgctgggtcaccaattgttgaatgaagaggcgacacagcagttattaacttcacatgctcatcaagaggatgaagagtattatgggcagggtatctggattgaccgtaaagaggaagacattttcaaatttcatgtcatggggtttgatccaggggtgtcgttcatgtcttccgtgtatccggactatgacctacaactggttgtgctctctaatcaagagtctggtccgtatccaataacaattgctatcgaagaagctttggcatgacgaataaccctcaacctatggtcaggttatggccacaaggttgggggttcattcgtcgaacatgatagcaggactgactacgtttataacattttccatagctcaggggcgattaatcgagggaaaacatccagcggaggtttctctttctttcgtttgtcattggttaacaccgtaacaagttcgagctctggcacaatatatacatactgaccaccaaatcctcgggcgtaataataatggagattggatttatcgtctacagcagcaatatcttcggtggcagacctttcattcggatagacatccacccaccaatgccaagcataactgccgtgattcggtggagtgactgtaataaaaggctgtgtcgaacgagatacgagatcacttgaaatgagagactcaccctcccacatcccttgttgtagaaacagctgaccgaatttcaacagatctacgggtaacattttaataccgaatccgcctgtatgaacaccttgagggtcaatttcccattcataatgcttaattctcagcgggccaaaaagataacgttctgcgaactcggctacgttcatacctgcattttgcatcaggatggcggataggatctgtgatactccggagttgtactccatatatgtaccgggtacatggcttaagcgttgttccaatgcaaaatccacccaatgatcggtgcgggtcatgcgagggaatgaattctgcccgccgaactcgtcccagttgaatccggctgtcatggtaagcagttgttccagcgtgatcgctggtttgcgcggatcaggatccgatgtcaactgtgggaaaaaagtagagattggggctgatgcctctggcaacaaacctttatccatcgctatacagatgagcgcggacagcacactcttggtacatgaattgatttttgcaatatcagtcgcagcctcttggttgcggtagtgttcgtacataatctcaccgcgtacgctgacgaggcagcttcgcagatccagttgtggaacgatctgttgtaatttggatgacagtgatgaaggattcatagtgtcctttctgtacggttgattttttattgggttttgtgatagcccgttatcgctctagagcatttgaagggtgtagacttaacatcgtttgggattgttcgtttgtcccagtatgtagtctacactcacattatggaattcagacagcttgataagaacaaagcttggaatatctaaagcgccagtttcataacgagaatatgttgtttgagaaattttcagcattttagccatttgttgttgagtcagatctttatcttctcttagatcacgaattcttatatacataaatatcacccttgatcagcttactctatgcggaaactgcatattgatatttatgcgtttttcgcatacaatttacttagaaataattgtaatgaggaattttaaaaagatttcttaaggggggacttgattgtgaagagtatattggaagacttgtattatggaaatatcaaacctgaagaaaatattgtaccgaaagatccgttatatcgatctgttaataaagaaatatcggcttctatagaaaattttcagcagaaactctcacaggacgagtttaaacagttggaggaactattcgataagattgatcatgtccactctatgcattcaagtgcagtctttgccaacgggtttagattgggggcattgatgatcattgagagtgtggtgtcatcctaaattgagaaagcgataactcccaattttgctcttaatggatttggagaattattttatttgaatggtggaaacaataaattatatgctatatgcttgagaagacaatgattattgtcttgagaaatattgagtttaaaaggttaggtgattgtaattgaataacacaatcttaggtaaagtttttactcaaaaaacgttcaaggacttattaagcggaagaaaaaatgagaactatattgcttgcatggaaagatatttacctgtaactgagaggattagtaataaatttgttgttgaggaactctataattttatgaaaactaattatcgcaatgaatattattataagaacaccttattgaataagttattacttggaaaacacagtctgagaacgactgtagcattaaccgaaattcctattgagaactccaaagctgattttgtattaataaatggaaaagctgttgtttatgaaattaaaacagaattagattcttttgatagattaaaaagtcagctcaatgattattacagagcatttaatcatgtgtgtgttgtgacttgtgaatcaaattttaataaactgaataatttattaagtgatactccggttggtatttatgtattaacgaataaagatacactaagtatccgaaaaaaacctatcgaacacaactcactacttaatcatcaggctatatttaagttattaaggaaaaatgaatatgaaagaattttgagaagaatatttggagaaattcccaaatctaatcaattcgagtattataaaaactgttataatcaatttatgagcatcgatatcctacgagcttacaaattagtattagaagaactgaaattgaggaacattgaggaggtggagagttataaaaatatcccattagctttaaaaagtttggtttatttctcgaattttaaaaagaaagattatgtcgaacttagtacattcttagaaagtgaatctagggggtaaagtttatgtattttccatacctgagagccaagcaattcgaattaatagcattaagagaattggtagagaatgatttaattggagaaaatatttttccgatcattgagcctttaaaactttcttcaacattgataaaaacaatggaatattacaatagagaaaatcgactattagggattgtacaaaatccgaaggttggaaattttatggataatttcgatgaaggaaatgagaataaattttcggaagcatataaagagattatgcggagtcgatatcttattaattgttatgtaacaaacgataatttcaagtctgaattaaatcagcaagtatcatcagaaaatcaaaataaagaggaaattatactcattcatgattcaagagattatttaaatgattactctgtagatttttcggggattcatcctaaatataatctcgtccctgatgaaagtatttacagaaggactgtcaaagataatagaatattatttaaagacaaatttataaagcaatcaagaaacacggattatactaaaacagaagacgaatttttttcggatgatcacttgttctttaaggaagagggatttgaaggatttgccgactattcaattattggagcagagtatagtgaagcaggatttgctccatatgcagtagctattcatattgtttattttgatgtcaatagtaatctaagaattaagcattttgtttcagactccaacaaggataccagagacccggctggtaaattcggagaagcgctaaaaaaactggtggaatgtagtgaactttcctccattcatacttatggacttaaccaatttcgatatcattacgataacggtacttatccgggattagggacagttaaaaagctctcagtaatgcatcattttgaactaatgagtcgttatttggatgaggtgagaccatgatttgttgttcattttgttttaaagaccctgagataagggatgtaataaagtcattgaagaaaataggtgattgtgaaacttgtgggaaaataaatgcttttatttatgatactgctgagtcaaataaagatttaatacaattattcgagggcctacttgaaatttatagatctacaagccttcttccagaagattatcctaaagaagaacgcgattttttgcgcaatgatttacatgaaagatggaatattttcaatctcgaaaaggaaaaaatagggccattaataaaaaatatatgtacacagaaatatttggaagaccctgatctctttgatgaaccagttgggatactttcgctacataaggaagattacataaaaaattcaatattgaaaaataatacatgggaggattttgttaaaggtataaaatatcataatagatttcacactgattactttaatctcgatatttttgaactgtttctaaaattttctcaaaaatcatattcaaaaaatgaaatcttttacagagcaagaatttcaaactcggatggactggaagtaaaagaaatgggagcccctcctatgcatcttgcatcagatggaagagtaaatgcttctggtattagttgtttgtacgtatctgatgatcgagaaacaactatacgtgaaatcagagcgggagcacatgatttcgttactattgggaaatttaaattgttagaggatataactatagttgatttgatgaatttgcatcaaataagtccgtttaaaacaattgatattattgatttttcgcaacatgcagttaatcgaaggcatttagagaaaataggtagagaaatagctaaacctcttagaagacaggatagcgcacttgattatctaccgacacagtatataagtgactttattaaaagcaggggttttcaaggaattgagtatacaagcactttgcatgagggaggtaggaatatggcggtttttaaccaagaattgttgaaatgtacagaggtttcggtagttaaaattaaagaggtgaattacagtcatgtgcctcaagcaagataattaaatcttgtctatacgtaggaggttagacctgtgttcaaaatcggtaatcaaggcacgtttgaaactttgcccgatcatgccatggcgatttacaagggagatattgctgctgtagaacaacttattggacagggcatggatctggaagaagagattacctcagtaaatacatagcattaacgccactcgaccttgccttaatctgcaatcaaccagaagtggttaagttgttggtggagcatggagttaatcttaatgccaaaaataatccgtctatcctgatggcagtatttgaagagttcttggcagaccctgtttcagctgtagagcatttcttgaattagatggatcgtatacaaactttttattaacctctttcctatgaacatatggaagaggtttttactaatatgaacatgccaatataggaaaaatatcatatgaaacatgaactatcttagtgcgtattaaggttagaaatggtaaaatatcaatgcctaaacatggaacaagtagatgaaagataattaaatttaggaaatagtgtagaatcagtgatttagcaaaagaactttttagtaaattatagtaatctaatactgaattgaggaattaaacatggcgattattgacgtaattaagtatgatggctcacctgatgtgtttgcttggaaacatcccgagactgaactgggaacatggactcagttaattgtgaatcaatctcaacaagcaattcttttcaaggatggaagagcacttgatatgtttggaccaggaaggcatacgttgagtactgcgaatatcccaatcttgaaccgactcgttaaccttccgttcggaggaaagtcaccttttgcagcagaagtatggtatgtcaatcaagtaagcgcattggacgttaaatggggaacggcgaatccgattcagatccaggatcccaagtataatattattgttcccgtaagaacatttggacaaatgggaattaaaatttcggattcacgaaaatttttggtcaagcttgtgggaacgctgcctgagtttaaccaagctaatatgattaattacttccgtgggttgattatcatgaatattaactccatgttgtcatcatatctaatacatagaaaagtaagtgttttggagatcaatgcatatatcgccgagatatcacgacattttgcagatacggtagcttctacttttgaagaatttggtattgagttaatcaacctgtatattcacaatgttaatctgcctgaagaagacccttcagtcattcgattaagagaagcgttggcacgcaaagctgagatggatattattgggtacacatatcagcaagaacgttcgtttgatacgcttgaaggtgcagcgaagaatgaaggaagcatgcagtcagacatcatgggcgcagggcttggtatgggcatgggggttggtctgggtggttctttcagtggcgagatgtcccagatgtctaaagtgatgtctacgaaggaaacgcctgcagtaagtatatgtaagcagtgtcatcatccgaatcaggagaacagcgctttttgcagcaaatgtggcaattcattagccgaaaaatcggtagcaacaacagattgcaacaattgtggacatgccttgccaaagggaaccaaattctgtcctaactgtggtgacaaataccatgcatgtccttcatgtggggcggataatgcggagaacgcattggaatgtatccaatgtcatcaaccgatgcctagcccatgcccaaattgtaaccatatgaattccggtcatacaaaattctgtggcaactgtggcacaggtttaagcttgaaatgcagtcgttgccaacatgaagtaaaacccggccagaagttctgtctcgattgcggaaacaatctgcaagaaggaggacaggcatagtgatggtaaaacggagtaatctcttgattttggatgtcgtctatttaatatgcatgttagtatcgtcaatcgtttcttttacggtgtttaatcaagcgcttttatcgttttctttttggatgaatctcgttgcttcttatgtagcgattacggctatttggatctacgcgcggttcatcatgcaaaatatggatcggtataaacggtttgttccaggttacacagctttaggtgtagtattaggtatttatctgatttgtgtgatgatctacacgttgttaacaggttcagcagatcatgcgcttcgctggttcgtattgttacacacggtaacgattgcgatcgcaattattttgtgcggaatcattatgatctatattcagagtgcgcgccgtcatgaaatagatgaacatacaaaaatcgcaaacttacaattaatcgaaaaagctttacaacaattgcttcataccatggtgcaacatcccgtcctaactgtggaagaagagcgcaaaaccgttcaatcattaattgaacttgtaaagtatagtgacccaatcactccggattcccttgagaaaaatgaccgccagatcttgctggacattgaattgatgaacagtgagcttacaaatcagtacgaagcaggggaattggtaaatagtgaacgttttgcttcgcaactatcccagttaaagttccgtttgaaagagcgcaatcaacagatcatgacaagcaaatcataaattgcaggaggagaaactttgaaaaagaaatttgggattatattcattataatttcatttatagcaattctgttctctttattcgaactatccgagggaacggatgtggcaattatcaatgcatttgtactttttgtaactggaattgttctgcttgtaataggaattaaaatgtgtggtcgacctaaatttcaacttaaagccgatcaacattatgttgacgattctagtagtaatgtgcaatatgacggaggtaactatcacgaggagtatgaagaagtcgaggaatctcaagaacctttatccttaatatgttcagggtgtggagctagagtaaaggtatatcctacttcgtctgcggattgtgaatattgcggaacaacgatgagaatctcgtaaaccgtgtagcggactaaatgacttcttttacggatacttgtaatatacactgctaggtagagtgtgatgttttaaggaggaaacgcggtgaagaaattttttggcattttattcattatcctttcgtctgtgacgatcctgttatctttaatattaatatccgaaggaacagaaacggccattatcagtacaattattctttttatccctggggttatcgtacttgttacaggcattaaaatgtgtggtagacctaaatctcattctaagactaatccataccagcattatgattctaatgataagcaagatcaggaagatcagcatcgtgtgaaatatgacgaggcacctcaagaaactgtagccgtgaattgttcagggtgtggagccaaggtaagggtatatcctactttgtctgcggattgtgagtattgcggaacaacgatgaggatctcttaaactgcataggaggaatcgtgttgttaaggaagttatttggactctttttcatgttttatgccattgctatacccatacgattacttatggaagagaatgtcgtagatcaattgaatatagttcttgtagttgaaattattatcgttgaatttttatttttgttttttggtattaaattgcttaggaaaaaacgtgttaagaaaaagcgtgtcccggaacgaaagttttatgggggagactatggaggtcatcttgatcgcgaaaatgcgaatccgcatacttattcaagttacaatagcaacaccgtgagttacagtagtcataatacaattaactatacagagatcaatttttcagataaggaaaacactgaagagaaagtcgaagaaaaagttgaagagccacaaaggcctgtttcagtgagttgcccggggtgtggggcgaaggcaaaagtgcttcctaagcaatcaacggactgcgagtattgcggaacaacagttgtagcaaattagaacggttcagaatggatacgtgaagggttaagcctgattcctatggagtcaggctttttatctcttcaattttgaatctaaagtccccctaacgatcaaatcgtcatataattccaactgagttgccttaatgcagtccctttaatgaaacgtttcgaatttatatttataattaagccacattatattcagtatctgtaagcgttttattttattgtttacggaaatgggaaatttatgataacatatacacgaaacgtttcgaatccatttgaagggagaaaatcatgaaaaaagtaaaactattcagcttcattttaactttttgcttgttagctaatctagctttaactcctatggcttcagcaggtgactcaagcaatttaattggatttcgagcagaattgaaagcgattgcatataagacctacacgttttttgaggactatacggatcagaacacgggcttgacttacgatgaagtgcgacacagtgaaaacgggatagaagaagctaaacgtacctcgcccacaaacatcgcaatgtatatgatgagtaccgtttcagcgcaacaattgggcattatttcgaagaaagaagctgtaaatcgcttgcaaacgacaataaattccctcgaaaaattagaaaagtggaacggcctattttataactggtataacacagatgacgggtcagtgaagaaagattggggacaatttatttcccaagtcgataatggctggttatccgctggtttaattgttgttgggcaagcctatgaagaacttcatggggaaacaagcaagttggttaaaaatatgaattatactccgctatatgatcctgaagtcggccaattccgcggcggttatgatgtggctaaaggcgcgctgacggaccaccattatgggatgttttatacggaaccacgtgtaggcagctatattgctattgggaaaggtgacgttcctcaagatcattggtggaagatgtatcgcacattacctcaagaatgggattggcaagctcagattcctcaaggcaaatccgttaagtacgatggagtggatgtgtttgaaggaagttatgtatacaaggataaaaagttcgtaccaagctggggaggcagtatgtttgaagctcttatgcccggtatggtcataaaggaaaaagacctgggtactcaagctttgggattgaacaaccagcgtcatgtcgaattgcaaatcgaatacgccaaagaaaaagggtatgccgcatggggcttctcaccttctgccactccgacaggttacagtgagtttgcagcaacaccgttaggtacctcaggttacaaagatggagcaacggtaacagcacacgcaacattccttgctctggattatgcccctgaagcagttcgaaagaacattaaagctttaaagaacttcaaaatgtttggcaaatatgggttctatgactcagtcaatgttgaaacgggagaacttgcaaaagcttatctggcactggatcaagggatgattatggtgtcgatcgccaactatcttcaagatggcgttatccgcgattattttcacagtgatgtgatagggcagaagccagaagaattattgaaaaaagaagtgttttccattcaatgaagggctgctttagattagagcaagatcactaacgaaatgggacgaagattaaaagatggacggaacgaagcagggtatcagcatgcttcgttccgtttttgcgtttaccactgataatgaagtcgcagatcgattagattattgaatttatccggaaaaagacaaggcatttacaatggcgattttaagacttacgttgtggggcataagcgcaaagaaagacgcgtacgccttcagtgatgatatgtttattttgttcctcatctaatgtcccgatttttcccggttgattgaataccaataaaaacgttaatgcagcgaagtgctttgcagccattttaggatcaatcacatggagcagtccgttttgtccaaacgctgtaaaccttctgataatcccctcttcagttgcgttatccagcctttcaaaaaacgagtctggcaggttggcagcttccaccataaccagacggatcaaagccttgtagtctgccgaaccgtttgcagaagctacgatttgctcacaaaataagatgagcgcctgctcaagatcttcgaatttcaagaggtggtctgatatcccttgctcaatcatgaccagaaccgctgaactggattcttccacaacggcaagtagtagattctgtttgtcgccataataatcataaactgtccgtttggaaactcccgctttagttgcgaccgtatcgacgctggaacgatcaaacccgtctgaaagaaacagctctcgtgccgccgcaattattttagctcgcttgtctgaagagcctttgcggattttcttgttttctgtatgatccattcttacgttttcccccttatatgtgtatttcagaaatggattaggtcctgctttacaaactacactgtacggtgtagtgtaacaaatgtagcgtatcaaatcaatgatcaaggaggtttttattcatgaataccataccgtctgttgttgatgttctcattgtcggggccggacccacagggcttacacttgcctgcgaccttgcccgtcgaaacgtcaaccatcgtattattgaacgaagcaccgtgtataacgttgcatctcgcgccaaaggaatccagcctcgctcgcttgaagtcattgatgaattggaagccgttcactacattgttgatacaggtgttgtggacttgcctgttcgttattataccgcagatggcagaagtgtggacaagccgactattactgttgcagccagcgccgaacttgagacaccctatcgtgatccggtctggattgctcaatttgatgtggaaaaagcgttgcgcgaccgatatgcagtgcttggcggtcaagttgagttgggcatggaagctgtagggcttgttcaggatgtggatggtgtatcggtaacgttgaatacagcacaaggagaagagcaaattcgtgctcgttatgtagtcggcgctgacgggggcaaaagcaatatacgcaaatttatacacttaccgttggttggggaaacacatgatcatgagcgatggtatcttggcgatgtacgattggaagggttagatcgtgaccatatccatatctggacttcttcggaggggatgatcggggtgacgccgctgccaaaatccgatatttggcaactgcaggctacaattccggcagccatcgatgaaccagagcagccgtcgctagaggcgtatcaagccatgtttgaccgtcgtgccgggtccggacgtgttcggcttacggatgcttcttggttgtccatctaccgggtcaacgttcgtatggttgaatgttaccgaaacaaccgggttttccttgccggtgatgcggctcatgttcattcgccggccggtggtcaaggcatgaatacgggaatacaggacgcatacaacctcggctggaagctggcggctgtcatacgcggagcagacaccgccttactcgatacctacgatgaggagcgccgcccagtggcacaggccgtgctcaaagacagcacaaagaaaatgggaggcgttataagaacggcgactgaaggcggagggttgtcccaatccttgagcaccatatccgacgatctgacgagcgggcttctcatttcctatcgttcaagttcgcttacccgtccgtctgctcgaacaaatgctacccgtttacttcctggagatcgtgctcctaatgctactggactacaaggcaccgggtttgcaggaagtgtctttgacctcttgcgcggcccacactggacgcttttggcttttgcaaactacatcgatccttctctgaagaacttcaccaacgatgcactccatttgcattatatctttccatcgaaggtggaggaggcggaaggcataatagacactgccgggaatgcttatcgaatttacgatgtcgcaagtaaagaacttgtattgattcgtcctgacggttacatcgccttgcgcacctccattgatgataccgcatcgatcctgaattacttgaatttgtgtggcttatcataggatcgagcgacccaaggttctgcccgagtcacatcgtcttattgaaaatagagtgcaagaaattctattcatgcaaaaaagggtcctgccattttcataacaggaccctttttgcgtaaactaaaaatccctcaaacgatcaaatacctcatataattcctcgtgattaaccttaatcaaatcatcttgacgcagttccaaatgctgctgtaattgatccagcaactccgttagaacaacataaatctcttcccgctcaacagtttcaataaagccggtcttggcatccatcttgttgaaggtctgtgtgtagttctcaaccagggagacgagccgtttgtgcatagcttcctgattattaaaatcttgacttaactgacgtatttccttcaaacactgcttgtacaattgagctgcttttttggcgtgtgctgccttgatgtggtcccgcccatcccaatcccgaaacggattgttcaggttctccgcaagccattccggtttgcgtgctttggtgatttccatatcaagtccggcagcagcggtttttttatatcttgttttgattgatttggctgcatcggcaggaaggctagttagccacagcgtagccaattgtggaagttgctctggatcagggaattcgtcaccattgaagccgaacaggtcatatgtagtgaaggtttgcatatttgccaaatgctgaatcgactctatatgggatacattgccgggtttaccccacagtcgcaactctgaaagctcaggataatactgcacaagtggcttcagattgagctccgtgatatctctgatatacagaccttcaagtcgtgagatacccctaacctgtggcaggcccgatggaacattgagcgtgatgcatctaccgtcttcataagccaagatacgcagatcaggagacaactctcctgtgaaattcagacttttcatctttgtgttcaaaattaattccttcaacccactgacatccacgataagtctggtcagatggctcttgctgatatcgagcatcgtttgaccatgatgtatgatatgaagttcattaatgaacgggttgtcctctataaatgaaaagattgattccgtatatccatccatttcaatatgtgtcagacaaggtagctttgcgagttcggctacatcttcagaagatctagggctgaaatcgcggagtgtactcgtactgcgccgcattacacgatcgccaatcatcacatcttcgtcatcatccgcagcttgtttgaactgcgctcttcggatcgcatcgataccttcccattcacgctggagatagagactttctccgatcggccagcctccgccatacgtatttgtttcctcggtgtagagaggggggatattgcctgcaagcacatactgtgaaggaacattagcactcacgaaactatgggcaagtcgatcattccagaaatagaagttacagatcaatggtttcatctgatgaagatgcatttcattaggcagttgatcaccagtccaatccaactgaaggacggaggcaagcgtgtcagaagttttaccctctgtttctttcagtccagttacctggcaggctgtatattgttgtaatttttcgacgtacacgcagtacacatctccaacattggggatcatgttatgctcctttcgttctgcatcaatcgatgctaagctacttgtaaactaagtattctgcagaactagtaatagatgaattatatcaaagtcattcagagactaccattttggatagagtcgaataggcttgaatacttttataaaaaggaacgatgtctatggatacaagtatgagccgcaacaaaaaactgggtgagtttttgaaatcacggaggagccgcattcaaccggaacaagttggattgtcaggatctcatggacagcgaagaacacccggtctacggcgggaagaagtggcagtattggctggtgtcagtgcaacgtattacacgtggctcgaacagggtagagagttggcggcttcacgagaagtgatgcagagtatagcgaatgcgctccgtttaaccctggaagagaagagtcatctgtttgacttatgggaccctaatacggaacatgaattccttgcttcgtattcgcaactggagccagggtggcagagcattattggccagttgactcatccttcatttattaccaatgaacgttctgaggtacttgcctggaatgaagctgcagacacgaacctcttcaacttctcgtcgatgaatgtgaatgagcgtttaatgatgcggattttatttctggatacagcgctcagggagcgtatgcacaactgggaggaattcgcgcggcactcggtagccgtattccgtacgtattatgacaagtatccgagtgaccccgaatttagcagaatcgtgaaacaattgagtgaagaaagtatagacttccgaacgatctggaacctgcaccaagttgaactcaaacaagtcaatcgtgtcctgcttgaaacgacggatcgggcagatggcgttgtgcatgcttacgatatcttttccatgaataatctgaacagccaatcaggcattcattgttgtatttacgttcctgctgccatatagaaagttaatcaaactggtaatttctttactagcataaacagagtgtggttggggtctcggaagtgaaatagaatgaactcaagttcatacgtatctagttaacgtttctatttcaagatgaaaagagggagccacatgctcaaaacaagaacactgggaaatgataaattacgaatatctgcgctcggcctgggtgtgatgatgatgccgtataatgacgaatctgtacataccattcagggtgcgctggatgcaggagtcaccatgtttgatacggcggatctgtacggagcgtatgaaaaacagcaatttggtgggaatgaaaaactgcttggacgcgcgcttcaaggtcgaagatccaaagcaatcgttgccaccaaatttggtataacacacacgcagggccccaagggagatccggcctacatcaaaaaatcagtagatgcaagtctctacaacctgggaatggattatatcgatctgtattatcaacatcgtcctgatccgaatacacccattgaagagaccataggcacacttgccgatctggttcaacaggggaagattcgatatattggtttgtccgaagcgccagtagcgatcattcggcgtgcacatgctgttcatccgattacagcgttgcagaccgaatattcattatggagtcgagagcttgaggatgagattatgcctgtcctgcatgaattgaacattggcttggttccatacagccctttggggcggggcttcctgacaggtcagatccgttctatagacgatctgccggaagatgattatcgtcgtcactatccgcgtttccaaggtgagaactttcagaaaaatctggaggttgttggattgatccaagagatggctaagcaaaaagggtgtacggtctctcaacttgctctggcttggttgcttggaaagggagaacatatcgttccgatcccggggactcgcaatctggaaagagttcacgagaacttaggggcgctaaaggtttcgcttacggatgatgagatgaaccagatagatcacatatctccccaaggcattgcagccggaggcagattccctggtcaagtctagttcgtttatacaagattctaagaaaccttaaagttcaggattaaaaacaatatataacatgtgtcaacggtattatctttctattctccggcatacagtacaacaatgagatgtatgcccaaggaggagaaatgatcgtatgatgaatccgattttacaagccccgaatgttccgctggcagccgattccaatgcggttgtcaattatcagagggattcacgcaactatgtaacccagttgtttggagaacagctgccgaccattgcaaatgggttcttcaacgtgtacttaagcaaaggaatcattgtgcagccacactggcacaccaatgtcacggagatggttgtggtcatcaccggtgaaattacagcgtcagtctttaatccgtttacgcgtgaacgattgacatatcgtctgaaaccaggtcaggttgtggtatttccgaaaggctggtttcactggtttgtcgctgagacagatgatgtatatgtattaactatcttcgatcaaccaacgcctgatattgtatttggagcggatttcttggcagctacaccgccggaagtggctcaccgcgcgtactgtttggatgaagaggcatatgcgagagctgttgcttccattaaaaatgatgcgattctgggccctccaatagggtgtgatacgcaggtttctgatcaatcgacttcaccttccaagacgtccgtgtcaccatccaataagctgaaatcttaagtcaagattccttatttattatcaaagtacacagcctgtaactggagaatatcagttgcaggctttttgatgtgtcgatgtaataatcgtatgaagtccatggaggggttggtattatattagaaaaaattcaaaatgcctgagtcagtgggttacgttctctgttagtatagtatgaacatccaacaaaaacggaggactcatgaatgaacatgtcagaaatgaaaacgcttgaaactgcaatgagttatgcacctattttgatgtttgacagagccgaacccttttatcctgattttgttggcatttctgtgttgcatcaatctgggtcttcaccatcgttcagaagggacattaagtttccgaccgaggtagtacaatatgtaattgaatatgcaatctggtgggattatgagattggacatctgtatgaaatggagcatgtatgggtttatgtgggtcatgacggagaggtagtagactgtgaagccagctttcatgggaaggtgttgcgcggattattgaaggaacgggtcaatgtggttggacatcatgtatgtctgtactcacagcctagcaaacatgctttctcaccacttccggttgtatttgagttattgccaaacctgtatagtgcagcaggtgccgaagctggatgtgatgggctacttgtgaataagttgtttcaagattattttgaaacaaatgaacagatcgatgctcaggtggagcgttatctgcagacgaaagcgtttgtacctaccatgaagttcgaagaatatttactaaaaccggagatgttcatgacgtgggatagtctgtttggaattattccgcacaggattaaggatcgcttaattgaactggagcagttatataacacataagtaattagttttaaacgggttttatgttaatttaaagtgtattttttgcttcataaccaaactttgttgatttgggtttggttttttttatgggaaaatggactcagtataagtaatcatttattagactaaggtcttgaaatgttgagtgtgtacagcaaaaatacataattttttgtgtggacaatgatatttgttaggcgtaagaactatataaattcttgtataaatataagaagatcatctcacatgaaatttttgtatggagatgtatgtgaaagtcaatgcagaatgctgaatatacgtgtatgtgtaagtagaaataaccgttaaataggtaaaaagtataaattatattaaaaagaagattctttatatctgaaataaaaattcataatagtgcaaatttatagaaataaaaatctcctattcagttttaatatatttatgtcgaaatagatcgtaagttgtctggagcgcgacctagagaagggtttaccaagcgttatatacataactggacactacgatgcctaggaggagattacatgaagtggtttggaaatttgaaaacagcaacaaagattatctcagcgtttttagttgtgtcgataatcctagcggggcttggcgtctactctgtagtaacattgagaagtacgaatgaacgaatgcaagagatgtataacaacaatctaatctctgtcaaagaattatcctctgctcagattgattatcaaagaatgcgtgtgaatgtgcgtgatttgaacttcgaaaccgttgaagctgaaaaaactcggatcacggaaaacattgcttcgattcgtcagagtgtgaatgatcgcttgaccatctatcgtccgcttgcaacaacccctgaagaaatagagttactccgtaattttgatgcggaatatccaggatatttaacaatgtttgaacgagcaactaatctggctgtcgcagatgatcaaagtgcctttaataccttccttaaatctgagcttaaaccacaaggagacaggattgtagaactccttaccaatttgattgacgttaatgaaagtttggctgaacaggcgaatatacaatctcaggctgcctattcacaagcatttaaagtaacaataattcttgtggttctgtccgtactcttcagtattctcattggatatatcatctctcgctccatttcgaagccgctcatggctatgctgggtctagctacggaagttgccaacggaaatctcacccttaagtcagacatatccagcaaagatgaagtgggtcaactagccgcggcactgaatcggatggtcgataatctgaaagagttaattaacaatatcgtgatgaactcccaaagtgttgctgcttcttcggaacagatctcagccagcacacaggaaattgcgagcaccagcacaagccaatccagtgaggcgggaaatatctccgaattgttcaaggagctttcacttgccattaactccgtcgctgcaagtgcggaagaagcggctgaactgtccaacgatacggtgaagactgctcgtgaaggtggacttgttgtacagacttcattggaaggtatgcaagctgttaatacaaaaatgactaaacttgaagatgattctcgtaaaatcggtgacatcattgaagtgattgacgatattgctgagcagaccaatctgctagcgctgaatgctgcaattgaagcggcacgtgccggagaacaaggacgaggattcgccgtagtagcagatgaagtccggaagcttgccgaacgaagtggcgaggcgaccaaagaaattacagccatcatcaaagcaatgcaggaaaatacgagacaaagtgtacaggctgtagcagccagtgttgagcagtcttccatgactggacaggcgtttgatcagatcattgatatggtcaataactcttcacagaaagtaaacgaaattgctgctgcatgtgaagaggaagcagcccaagccgcagaggtgatgagctctgttgaatccatttcggcttccagtgaggaatccgctgcagcgtctgaagagacagcggcaacatgccagtctttggcacatcttgcggaagaactggcgaattcggcagctgccttcaaaacaaattaataaaattgaattgagggtgaattgatgtcttcacttcagaaggaacaatatattgaactgtctgtaggtgcagagacttgcgccattcgaatcgaagaaattcacgaaattattaaaatgctgagcatcacagatattccatttagccgtccagagatcaaaggggtagttaatctgcgtggcaaggttgtatgtgtaatgagccttcgtaatctgctgggtatgccggatgaatcggacaccagagcgacgcgtattatcgtagttcgacatcaggaagaatatattggcttgatcgtggatcgcgtgaacaaggtaaccacatattcggaaatacatccgccaaccggcggatatggtcgtaaccgtgaaggtttattccatggtgtgggtcaacaggaagacaagcttgtgggcattttgaaactggacgaaatattgggcggttagggaggtatatacgaatgatggatttgtctgcctaccgtgacatctttatcgaagaactgaatgatcaactggaacgtatggatcagtctttattggcattggagctttcgccttctgtagaactggttcagacgctgtttcgggcagcccataccatcaagggatcggcatccactatggatttccgtgaattaagcgaccttacgcatgaagtggagtatgctcttgaatgggtccgggagaaaaaaccggagatgacttcggagctaattgatacgttgttccgctctttggacaccatgaaggtgcttcgtgatcagtacatccgtggggaagcttatgcagattttcgagtagtagtaagagaaataaaggatttaattcagaccccgacagtagtcgggcaacttaaaacacctcaattgcaaccagcagagtcgattatggcacaggtagctattgtgtcaggcaagcagttattgtccattcatgttgtgctggagcagaagtgcatgatgaaagcggccagatatcatattttacgacaacgcattgaggacatctgtggtacggttgtcgctacttcgctcatggagagtcaaccgggcgcgcagaatgaagatgatcattatggtcagttcatcatcatcgtagcaacgtcgaatgaccaacagcagcttaaggcagagctgtcttcagactcggatattcatatgctggagattgatccatatctgctggaatccaatgaggttgcagcgacgtctgcaccacttgaattaatctctgaaacagagcaaacgaaacaaagctttcctaccgtgaatacaactgggccggatgagaaagtgaaagctgctcaacctacagttcgtgtgagtgttgaacgtctggaccatttgatgaatttggtcggtgaactgttaattgatcagacatcccttgcagatctgagtggatcgggtgcgcgtaaggagtcttcaacactcatccggagtattagtggtgtatccgatcatatgggcagggtaatcaaggaactccaagaaggtgtaatgaagacacggatgttacccattgatcaactattcagtcgcttcccgagattggttcgtgacctatcacagaagctgggtaaggatctggaactggttattcaaggtggagagactgagcttgaccggatgattattgaagaactgagtgacccgctgatccatctcatccgcaacagtgcagatcatggcattgaaagtgcagagattcgggcggagaacggtaagccgtccaaaggacgtattacattaacttcgtttcatgaagaaaatcatgttgtcattcgttattcggatgatggcaaaggtatcgatggtgagaagattaaagcttccgccttgggcaagggcatcattagtgaggaacaggctacacgcctaacaacacaggaagctgtccacctcatatttgaacctggcttctcgacggcttcttctgtcagtgaagtatcaggacgcggtgttggaatggacatcgtgcgtagtcagatcgggcgactcaacggcatcattgatattgatacggaggttggtgtgggtaccacgtttacgattcgtctaccgctcacactggcgattattaaaggtctgttagtcaaagtatcgggtcgtgtgctgatcttgccgatgtataatgttgctgagattgttcgaatttcacctgaagatattcagatgatccaggggcaacaagcgatcctgaatcatggacgaattgtaccttttcaccgactgtgtgacaggctcaactatccacgaacagaccgcaaatccaagaccattccactggtgatcgtgcgttccgttgataaaattgcagcttacgcagtagatgagattataggaaatcaggaagtcgttattaagacactcggtacgtatctgggagcgatgaaccatctatctggagcaacgatcctcggtaatggtaaggttgcccttatattggacgcgtcctatctggtgagtctttaatcgttagataaacacaaatttttatacaggccaaaaagcctcatcatccataactggacggtggggctatttgttgaaccttttgacattgtgaccactcaggatttgaaaatgagatccataaaccggttggctgccagagagatcggcatattgcgtttggtcataatccccacatgggaaggggggagcgggacatcaagctgaatttcgaagagagagccttcctccagctctttggagataaattcacgtgtgacataggaaatacccagtcctcgacgcgcaaactcaatcaacagatcaacactaccaacctcaatctcaggttttaacgtgtaattatagctgttaaacaactcagttatagccatccgaacacggctgttccgggagaagaggatcagttgatgctccagaagcatctcaagtgtcatgattttacccttcaactgagcataacgttccccagctacaaaacagtccttcaactgaatactttccctgacttctagctgtggatcaacaatgggcatccgaacaacaccaagatcaatcttgccttctttcagaaaggtgatgacttccggcgtagttccatgactcagatgtagcttgatattagggtacaaggtgtggaattcctctagatacgccagcatgtaatgcttgaacagggagtcactgccaccaattctcaattcaccattgtcgagattcttcagtgcggccattttttcttctgcaagtgagatcagaatctgggattgttcaatataggagtatagactggcaccttcctgtgtcagcgctacacccttggaatttcgataaaacaaggtaagaccaaagctctcttccaattgcttaatggcatgactgacgctgggttgagtgatatacagtgctttcgcagcctgtgtcaaacttcccgttttggcggcccaataaaagactttatatagttcgtaatttgtagtcatagatgtggtctatagctcctgtgaaatatattaattacttgtatggctataaaacgtattatagtgtaactacaacaaagaaaccagagttacttggaaggagaacggtaagatggaaccaactaccattgttttatttggtgcaactggcgatttagccaaaagaaaaatatatcctgccttatataacttatatcttgagcagaagcttcctgaaaccttctcattgattggtctggggcgtagagattggtctgatgaattctttcaggcacaagtggaaaaatcattaaatgaattttccagacgccaagctgatcctgaagttgtgaagtcatttgtgaaagctttccgctacagtgtattgaatataagccataaggaagattatataaagctgttgggattagttgaacaaagagaagctgagcttggcattccgtccaatcgcttgttttatctctcggttggtccggaatttttcgaaccgattgccgagaacattcaagaaagtggactgggttccacagagggatggaaacgcctcgttatcgagaagccatttggtcacgatctacagtctgcgagagaccttaatcgcaaattaagcgaatcgttcacggaggaagagatttatcggattgaccactatttgggcaaaccgatggtacagcgtctggagacgttgcatcagagtaacccaatcatgaaggcgttatggaacaaccgttacatctccaatgtgcaaattacggcgaatgagactgtaggtgtcgaagaacgtgcatcctattatgatcatgttggtgcagtgcgagacatgttccagaatcatatgttgcaattgctcatgatgatggcgatccagcttccatacaacagtacttccgaaaaagttggattgaagaaaaaacacattatggaatcgatccagccgttacaaaaacaaactgtgggcgcaaacatcatccgtggacagtatgcagaaggcaacattcaaggtaaaccggtaaatgcgtatactgctgaaccgggtgtagccgagaatacgatgaatgacacattcattgctgccaaattgcaaattgatgatttcttctggcgtggtgttccgttttacattcgcacgggtaaaagaatgaaggagaaatcaacacgtatcgtgattgaattcaaagaaccttcaggacagacaaatgtgctgaaaaataagggttccaagccaaacctgcttgtcattgagatgagtccggatcagagcatgacattgcaactgaatgcaagtgatcctgagaataaaggtgaattcaaaccggttcatattgatctttctccggacaaaggtgaccttgcggaagcttacgagaatctgattcgtgatgctttgctgggtgatccaaccttctttgcccactgggatgaagtagaattgtcatgggcatgggtgcagccaattctggatgcattccaggaaaatctgttgccacttcacctgtatcctgcgggtagctatggaccggttgaatcagatgttatgcttgaagaagaaggtcaccactggtggtttgatgagccggcggatcaggagtctgtagttacaaatagcacacccttggcggttaatgcaaatctctaaaccaaaataaaaaatatatctggaggtaatttaatcatgaaattttttatcgatacagctaacgtggaagatatccaaaaagcatacaaaatcggcgtattgtctggcgtaacaacaaacccatctttggtagccaaagagggcgtgaaattcgaagatcgtattgaagaaatcttgcgtttggtacctgaagtggagtccgtttctgcggaagtgacaccagatgcccttactgctgaagaaatgatcgcgcaagcagacgaattgatcaaaattaacaacagcgacaaaaacatcacgatcaaattgccgatgacactagcaggacttgaagcttgccgttacttgaccaaaaaaggtgtgaaaaccaacgtaacgttgatcttcacggtgaaccaggcacttctggctgctcgtgctggtgcaacatatgtatccccattcctgggacgtcttgatgatatctccgaggatggcgtacaattggttaccaaaattgctgaattgttccgtacacataacctggatgcacagattattgcggcttctgtaagacatccggatcacgttacacgtgtagcgatggctggagcacatattgctactgttccattctccgtcattgaacaaatctccaaacacccactgacagatcaaggtatggacaaatttgcagcggactggaaaaaaacagtacaataatcactgaacatatattcgtttcaacttacaataaaactatataaatcatggagcattgggaggacataatgagtaaacaacagattggtgttattggattggcagtaatgggtaaaaacctggctttgaatattgaaagcaaaggtttctcggtagcggtatttaaccgttccccagagaaaacgaacgatcttctgaaagaagcagaaggtaaaaacctgacaggtgcgttcactattgaagaattcgtggaatccctggagtctccgcgtaaaattctgatcatggtccaagcaggtaaagcaacagatgcaacgatcgagcaactgcttcctcatctggatcaaggcgacattattatcgatggaggtaatgcttacttccctgacacacaacgtcgcagtaaagaactggaagaaaaaggtttccgcttcatcggagcaggtgtatccggtggtgaagaaggcgcactgaaaggcccggcaatcatgccaggcggtcaggaaagtgcttatcagttggtagaaccgatcctgacagcgatctctgccaaagttggcgatgacgcttgcagcacatatatcggaccagacggtgccggacactatgtgaaaatggtgcataacggtatcgagtacggagatatgcagttgattggtgaagcttatcacttgctcaaatccgtattgaacgtttccgttgaagagttgcatgagatcttcactgagtggaatcaaggggagctggacagctacctgatcgaaatcacggcagatatcttctccaaatacgatccagaaacaggcaaaccaatggttgacgttattctggacgcggctggacaaaaaggaacaggtaaatggacaagccaaagtgcgctggatctcggcgttccattgtccatgattacggaatccgtattctcccgtttcctctctgcgatgaaggacgagcgtgtagcagctagcaaaatcctgaatggaccagcaactgaagcattctctggcgacaaaaaagcattcatcgagaacgtgcgtaaagcattgtttgcaagtaaaatcgtatcctatgcacaaggatttgcacaaatgcgtgcagcttccgatgaatacggctgggatctgaaatacggcaacattgccatgatcttccgtggcggctgcatcatccgttcgcagttcttgcaaaacattaaagaagcatatgacaaagatgcagaactcaaaaacctgctcttggatccttacttccaaaacatcgttgagtcttatcaaggcgcatggcgtgaagttatagcggctgctgtaaaacaaggtattccagtacctggtttctccagtgcactgtcttactatgacagctaccgtacagagcgtttgccagcaaacttgctgcaagcacaacgtgactacttcggtgctcacacattcaaacgtgtggacaaagaaggttcattccacttccaatggatggacacaaacgagtaattttaatttcgaaaatatagcattcctgcagttgtccttgaatttaactattcagggcggctgcgggaatgctttttctcgttaatggttcgaatttgaatatcatcaaattgtaataaaatgtacgaatctgagtttggcaaacagatgatctgacccttcaactacgttatacttgttcagacggacctatatccgtaatgaaaaatcagaatacaacttattgacgtggaggttagaccgggcatgtttgtattagcaggtatattgtttttggtcgtatacggtttattagtgttctacataggttggagcggttggagttggatgaaaccagttgtgtccgccagatttcggtggttgtatattatagcgcttgtatttcttgccacttccttcattctggcacgggtatttggaagcatctcgttcctcggtatcatcggttcttactggctggcaatcttctcgttgttattgttgatcctgcccgtcgtccacctcacgatgtggttgctgagattaacccgtattcctagacatcacacccagaaatgggcgggagttgttacgctggtgttattagtgtccacattaggttatggaatctttaacgcttacagcccggtagtcagaacatataatatccagattgataaaaaagtagaaggtgtagacaagctcaacattgtcatggctgccgatatgcactttggacttctgtctggccctgcacatgccaaacgcatggtggaggaaattaatgctctgaagccggatctggtgctgtacccaggagatattattgatgacaatctggatatgtacctcaatagcggaattgccgatattatcagtgacattcaggctccatacggcgtctatgcttcactcgggaatcacgataagtttgatggtccgattgaagatctgattgctgcgctggagaagagcaacatgcaagttctgtacgatgacaagattgtcctggatgacaagatcaccctcattggacggaaagaccgaacagagaaggatcgggcagaagtagctacgttaatgcaaggtactgacttgaaccaaccggtacttatgatggatcaccagccgtatgatctggatattgcggagcagaataatgtagatctggtcgtatctggtcacacccatcgtggtcagattgcaccggctcagttcatcacacaggccatttatgagaacgattggggttatctgcaaaagggctctatgcactccatcgtaacctcaggatttggcttctggggaccaccaattcgtactagcagtcgttcggagattgtacagattaatgttacattccagtaataatacggtgggcccttcgagagaagggtcttttttgttcgaagcaagtgatcaagtgatgcttattggttgatttcgtttgaatctgctccaaaatgtgaatactaaagcatatgcacccttaaacgtggaagcttagggaaaagactcatgtaagggaatgaagtggaatagcaatagtagtatttttgggttgacaccgttttcaggttatgataaattatatccgaggcttgttaccggtaatgcgggcaaaaccactatggaaatgattttattatttctgttttggttttgcccttttttattcctcaaaaaaaaccaggtgggtccataatgattattaaacagatatttaataacaatattgtcagtaccgtggatgacaaaaatcaggaactactgatcctcggccggggtatcggatttaagttcaaagcaggcgatgagattgatgaagagcggattgagaaggtatttcgtcttcaggatgcatcgatttatgagaaattcaaatccatcgtagctgaagtgccgattgagattctgcaggcgacagatgatattgtgacactggcacgaacgcaattgaacaaaaccatcagtgacgggatctatgtctcgctgtctgatcacattcactttgctgttcagcgcttggaaaaaggaatgattactcgtaatccactttcttgggaagttcagcacttctataaggcggagtacgatgtggccagagaagcactgaccttgctgaaggaaagactggatattgagtttcccaaagatgaaatctgtaatattgccttacatttcatcaatgcggaagtcaatgattccatgaacgatgtcacccatctgatgcagctgttgcaggagattatgaatatcatcaaatatcacttcaacgtcgaattggatgaagatagcgtcaactatttccgcttcatcacccatttgaaatatttctgtcagcgagtcattactcattcttcacatgatgatgccgaggagtatttatatgaagtggttcggaaaaactatccggagacattcaaatgtattggcaagatcgagacttttatccataagaactatcagtatgacatgactcactctgagcagttatatctaacgctccatctggaacgtttgatgaaaaccaagcgggacgaaaagttcacgcaatagaatcaaattacaactggatatcctatgggcttgttactgttcaatcaggcaatacccgaatgagatggcgccatccatatgcgctagattcgttcgggtattttttattggaaaaatgaggaggaaaacatcatgaaacatcaggatacggcgcaggaaatcattaaagccgttgggggaacaaacaatattaactcagtttatcactgcgtcacacgtttgcgctttgatctaaaagacaacgagaaagttgataacggctcactcaagaaactggataaggtcatgggaacgaatatttccggcgatcaattccaggtcattatcggtaatgatgtggcaaaagtattcgatgccatggtgagggaaaatccagcaatccagcaaactacagaaaagaaagagccaaagtcggataaaaaacaaaatgtcgtgctgaaaatttttgaaacaatcgcaggtgtctttgctccaatgcttccagcgattactgcggcaggtatgctcaaaggattacttgcactattcgtgtccgtaggttggatgtctgccggaacggatacgtatcgtattctttcagccattggtgacggcgtattccactacctgcctttactgattgcagtcagcgctgctcgtaaattcggcagtaacccgtttgttgcgattgcactaggtacggcactcatgtatccagacatgacagcattgttatctagcggtgaatcggttggatttttgggaatcccggttacagcagtaagttatgcttcatcggttatcccgattcttcttgcagtatggttgatgtcctatgttgagaaatgggttgaccgcgttatccctgctgcactcaagttgctgcttgtgccgctgattaccttacttgttatggtgccggtaacgctgattgcgatcggtccattgggtacatttgtaggtagcggattgtctggcggcatcaactggctgctgaatgaaggtggattgattgcaggtattgttcttggcggcgcgatggcgctcattattatgacaggaatgcactatgcacttgtgccgatcatcctgagtaatatcgctacactgggctttgataaattcttgccgttgacctttatctccaatatgggtcaggctggtgcaacactcggcgtattcttccgggcaaaagataaaaaacttaaaaccgtggcattgtcaacgagcttcaccgcactcatgggtgtaacggagccggctatgtacggcgtaaatatgaaatacaaaaaaccatttgccgcagccatgattggtagtgcagtgggtggcggattcgcccttgcttttggcgcgaaagcgtatgtgcttgcgggtaacggtggtctcccgggacttccttccctgatcggacaaaccttctggtattcctttgggggtatgattttggcctttatcgtgggtgcaatcatgtctacgatatttggtatcaaggaagaagaaggagacgctgaggcgttggctcaattctcaccgggtgcttctacagcaccagcgaaagctgtttccaacgatgctgcaaccgtaaatgtagacgacatgggtgatccaacaccaacgagtgatgcagtagctgttgcaccgatgacaggtaaatccatcccgctcaaagaagtcaacgatccaacatttggtgatgaattgatgggtaaaggtgtggcatttgttccaacggtgggcgaattggtatctccagtgacaggtaccatcatgaatgtgttcaaaacaaaacatgcgatcgttgtccgcagtgataacggaatggaattgttgattcatgttggaattaacacggtgaagctgcgtggacagtattttgatgcacatgttgctacaggagcacgtgtacaggctggagacaaattactcacgtttgaactgaccgagattacaaaagaatacgacatcacaaccgctatggttgttaccaatacggctgattacaagcaggttctacctgtgaaattgggcgaaatcacgatgggtgaagacgtcttgaaagctgagatctaaactgtccgtcttaggactaacaatatcaacaaaagaaggagagattcgaatgattaatcgacaagggtttccggaaggttttctatggggcggcgctattgccgctaaccaggctgaaggtggatttgacgctggcggcaaaggatggtcgacagccgacatggttccttattttgagaaaaaggactacaccaaccttagagaactgatgcatgttaccagtgcaacggttgagaaagcaatggcacatcacagtgcagaaggttatccgaagcgttacgggattgatttttaccatcgtttcaaagaagatattgcgctgttcgcagagttgggcttcaagacattccgtctgtccatcaactggccgcgtattttcccaaatggttatgatgccgagcccaatgaagagggactgcgtttctatgacgaagtgttcgatgaactccggaaatacgatatcgaaccactggtaacactctcgcattacgagatgcctatggcacttgtcctgaaatataacggctgggctggtcgcgaagtgattggacactttgtgagatatgcggaaaccgtgatgaatcgatacaaggacaaagtcaaatactggttgacgtttaatgagattaacacaacgattattgaaccgttcacaggtggcggtattattgaagaccgggttgaaaacacgatgcaggcttcttatcaggcacttcatcatcaatttgtagccagcagcctggtaacagaaaaagcacgtcagattaacccgaacttccagatcggatgtatgcttgcacgcatgattcactacccagcgacgtcgaagccagaggatgtgctacaagcacagatcgataaccagctgaacctgctgcatacggatgtacaagttcgtggtagttatccaacgtttatggctcggtactgggcagagaacgaaattaccattgccatggaaccgggggacgagcagatcctgcgtgagcatacggttgatttcatctcgttcagttattacacatccttggtgtccgcagtgaaccctgaggaatatggagtaactggaggcaacctgtacagtacgatcaagaacccgaacctggagcgcacggaatggggctggcagcttgatccgatcggtctgcgcgttgcattgaaagagctgtatgaccgttatcaactgccattgtttgtggtagagaacggccttggtgccaaagataccgttgaagcagacggttccatcaacgatgattatcggattgattatctgagaaaacatattacacaaatgaaagaagccgttatggacggtgtggacctgatgggatataccaactggggagcaattgatatcatcagtgcatccacttcggaaatgtctaagcgttatggcgtgatctacgtggatcaggatgacaacggacaaggatcattgaatcggtataagaaaaagagctttggctggtaccaaaaagtcattgcctcaaatggtgagaacttggaatagattaatctatataggcaccccgggcgtagctggtattacggcgccggggcgcctttttattataatcaggtagaattctcattaacgctattggtatttcaaggtaaaaaagatgactacataacattctggatggtatactgtgttcgtattgggggagggataaccatgaagaagcctattattgctgtagatatggatgacacgatatgtcatctggtcaagcgggctatatatcacaacaacctcaacttcccgacccatccgttgcgctacgaggatatgattcattgggatacatcccatttgcgtcatccagagagcacgcacgatgtattttatggtcggccgggtctgttcgaggaattggaattatacgacgagtatgttgtagatgagatgcgaaagcttaacgatgtttatgatgttattgttgtgacggcagcagaaccaagaacagtggttgagaagtggaactggcttcagcagcatatgccttttatagccgcagaacagtttattacatgcaaaagaaaaaacctgctcgctttcgatctgctcattgatgatggagcacataacctgatccccgcgcatgaggacggcaaaaaggtcatctgtatcccacatccgtggaatatacaggagcgtgagcgatacaactttccgttgatgtcttcttggaaagaggccaaggcatacatagatgaagtgttacaggttgttggtgtctgaaagtaaatcttattgtccagagtgctatgctctggattttttgcgataggcgagaggtgtttcgcctgttatttttttgaatgcagcatagaatgaatccatatcccgatatccaaccagctcggcaatcaggctgactttgtgctgtgaactcttaagcagttcacagcttttttgtatacgcaggtgttgcaggtggctgctaaaggtctgtccggtatgccgcagaaacattcgcccaatttgcttctcgctccagcccgatacacgtaccagatcagacattcgaatacggttgctcacgtgttccttgatatagtgaaggatgtaatcaaaaccggtggaatgattctcttcatcatgttccttttgataaagttgtctgtaggtcatcaataccaactgacttaccaaggtgtataacatggtagacgaaccgattcccggaacggaggattcacggtacagcttcaccattagttcttcaatgcggtcgttgtgatccacaacggatatataaggaacctgattttgttccagatccatcagatgttgaatgatttctttttcctgaatgattgctgtcagcgtgtggatcaattcagcattaaataagcaattatatagaattaacggatgctcggttacgttggtgctgacaggacgaaagacatgaggaacgccgacaggaatgacaaacagcatcccctttgtcaccggaatgacatcttcaccgatatgatgaaagccctttccttcggcaacgtagctatattcaataaaatcatgtgcgtgaaaaggaagcacaaaatcttcagagcaacgattgacaaaaagttgcaaatgattatgcagaaagtattcacttttcatgagttgtacagatgaattcacaattaacctcctcgcacagatggctgaatcaccggatgaaatagtcctgattaccgggtatttagggcaacaggatcgatataattatatcgtaaccccgaatgggaagccaagatggaaaggacgatctgctaatgttcaacgttagtcaccttcgctgtgagtatagaatcaacccgataggccttgatgtccaatcaccgcgtttaagctggcagctgcaatccgatcgtcggaactgcatgcaatccgcttaccagattcagctgtcattgacggaagattttgatggaattgcatgggattctggcgagataagcacggatcaatccatacatgtggaattaaaccattttcagccttccccgcaaacgcgatactattaccggattcaggcatgggatgatgcaggaaatgattcgggccggtccgaatcggcttatttcgagatgggacttatggatagtcataacaagtggcaagcagaatggatcacagctcaaccatcagatgatggagatacgtcatgcccgcgtatgcgcaagcagtttaatgtgaaacaacctgttacttctgcccgcatatatgttacagcacttggattatacgagttgcatatgaacaacacaagagtaggagaagattattttacacctggttggacctcttatcgtaagcgattacaatatcaaacttatgatgttacccacctgcttcaggatggacagaatactttaggtgctaatctgggagatggctggtaccgaggatatcttggctggaacaaagaacgggagatatttggttcaacgtccgcattgctgctggaactgcatatgaaatacgcagatggatcagaggaatgtattatatccaatggggattggaccgctgctcctagtgccattcgtatgtcggacatctatatgggggagacgtatgatgcacaaatggagtccgactggtcggattcatctcagacgaattggtcacccgtgaacgtactggatcatcccaaagatatcatcgttgctcaggagaacgtacccgttacccaagtagaacagctacagccaatcgccttgttaacaaccccacagggagatcgtgtagtagacatggggcagaatatggtgggatgggtgagattcagcattcaaggtgaggcgggtcagacggttgagctgcaccatgctgagatattggatcatgaaggcaacttttacaccgataatcttcgcgccgccaagcagtgtattcgctacacgtgcaagggggatggcgtggaatcatttgaaccacattttacgttccaagggttccgctatgtgaagctggttggctttccggaacacgttcgtctggatgaattcaccggaatcgtactgcactcgaatatggagcaaacaggtcagttctcatgctccagtccgctggtaaaccaactgcatcacaatatattgtgggggcaaaaagggaatttcctggatgtgccgacagactgtccacagagggatgaacggctcggatggaccggggatgcacagatgtttgtccgcacgtcctcctacctgatgaatacggctcccttcttcaccaaatggctgcgggatctggaggcggatcagggagaagatggaggtattccattcttcgttccagatctgagaggttccacctcagaagggtggggagacaccagtcattcttccgccgcttggggggatgcagcagttatctgtccttggaccatctatgagatgtatggggatgccagattattggccgaacaatatgagagtatgaagcagtggatcgagtatattcatgtgcagggtgacaatccgtacctgtggaacacgggattccactttggcgattggctgggactggactccaagcctgatagttatgtcggcgcaacggacacggattatgtggcaacagcattctatgcctattcggtgtcgttaactcaaaaagcggctgaggtccttggaaagacagatgatgctgaatattacaagcagttgcatacaaacattgttcatgcgtttagaaatgagttcgtgactccagccggcaaaattgctgttcctacgcaaacagcacatgttcttgcgcttcaatttgacctgctggacgcgactgcccgaactcgtgctgttggacaattggcaaaactcgtgaaagaggcgggcaatcatcttactacaggtttcgtaggcacaccttatctgaatccggtattgagtgatgcaggtcttcacgacctggcatatacattactttttcaagaggattatccgtcctggctatatcaggtgactcaaggcgcaacgaccgtctgggaacattgggatgggatcaaagaggatggcagtctctggagtgctgatatgaactcatttaaccactatgcgtacggagcgattggagaatggttgtatcgttacgttgccggcattcggtccgatgaacatcagccaggattccgaatggtgcatatcgagccgcaacccggacctggactggattgggtggaagcgagtctggagacgatgtatggtcaagttgcttcaagttggcaccggctggcggagggtgaaatggagattcgggtgcatattcccaccaacacgagggggacggtacgtcttcctggagcaggtgcacagatcgttctggaacaagggaaaccgttggatcagataagtggagttcaggatattcaaaacattggagacgatgttgaagtcacacttggatctggaagttaccaatttacgtacaaagacacggatgagaaaaaggatcgggatgttcaggaggctgcattgacagagtccgtataatgatagaataagcggtaaaaggtacacttgaagaggatctgcacacacgcaggtcctttttcgaacttgtctgagagtgaatttgtattattttaacaatgaaaggagcatgaccatggcaaaacctgcattcaaagatgcacctttacgtagtgaaatagaggatttggctaagcaacaggatcaccatacattggcctgttgggctgcggagtgtgcggcacgtgtcttgtatatatttgagaagaagacggaagatcttcgcgcccgtgatgccattaatgcaggaagaggttggatccgtggagagattgccatggttgatgctcgaaaggcggcttttgcagctcatgctgctgcacgggaagccgatcatgtcgctgcctctgctgcatctcgtgcggcgggacacgcagctgcaacggcccatgtcaaaggccatgcggtgcatgccgcaacgtatgcagtgaaagctgtcttttatgactgtttgatggaagagcaagaacgtcgtgtcctggaagagagaacgtggcagtatcaatatctgttgggaggatgtaatgaccatggggaaagaacaagttagattaattaaaccatcacgagcatataaggaagcatatttggcattttatgaagactgggtcagaagtggagaattgatggtaccttgggtcgtttccaaagatccttatgcgttcgatgagatgttggcgtttttgcagcgcaatgaacaagggatcgacatcccggagggctgggtcaaagacagtacatattggctggtcacggagagtcaacaaatcgtgggtgctgtgaatataaggcatgagcttaacgataaattgttcaacagtggaggacatattgggtatggcattcgtccgggggagcggcacaatggctatggttcagaaattctcaggctttctttggagaaaacgagagagcttggaatcactaaagtattgatcgtatgcgatgcggttaatgagccttccagaagggttatccttcgaaatggtggcattcgggatgaagactatgtggagtccaatggcaacgttgttgaacgattctggatagagaatgtcgaataatgcagaataatgatgaaataaaacgaaaataatatggattatgattgtattaccctcgtgtgctgattaaaatgaagcatagaatctggattgcggccggaaactatcatcccatatcaggcacaagtgaggttatctttatgaatcaaccggttaatcggccccggcgaattgagtatctggatctctttcgtgcttttgccatcatggcagtggtagctattcatgcaacttcaacagcagttgcgcattaccccaagcatacattagatcatgatgtgtattacttctggaacacgtttttgcaatttgccgttccagcgtttctgttcctgtcatccctggtcttgttctacaactacagctccaaggtgaatgagaagggttggatgctcgctttttataagaagcgtttatttaatgtatttgtaccctatttggtgtggtcccttatctactttgccattaaacagttgcttgcgggcaaagaacctttgacccatggtgttcaatttgccaaacaattagtgatgggaaccgctcatacgcacttgtacttttttctgattattcttcaattctatattgtttttccatggcttctgtcccttacacgccatcgtttgtttaatcgttatttgccattattctttattgcgggccaagcgatcttctatgcactacatttgcagtttcacttcgaacggacaggaagtttgttacccagttatctgatcgtgattggatttggcgcatgggttgggttgaactttgagtgggcattgaacaaactgtatactcaccgttatgtgctcatagctgcgttgataggtggaggtgccatttttatatatggtaatgcttatatcaaaaccgcttttgttgcatacccggttataacctatactgtgctgttcctgttccgtaatctgtttaccttgtcagcctgcctgctcctactgatctttagtgaacgaatcggcacaggaaaacataccgaggttcgaaaagctacgcgtattctggactccttgggtacagttgcgttcggtgtatttttaatgcatccacttgtactgctcttctggagacgtgaattcacagatgaactggctaggcacttcagcgtgggcatcattctatcttatgttgtggcgctcctgatctcatggatctgtgcgatgggtttgcgccggatgaagtggggatgggtactgatcggacggtaagtataaataaacatatgtaatctaagataagagatttcaagccctcacgtcttgagggaatcacttgaaacctcttttttatttgccctaaagaaggtattatagagtttaatgtccataaaattgaattaatggaatgaacactaccttgtcaggagtgatcaaatgaaattggtgattatttttggtccgcaggctgtgggcaaaatgacggttgggcaagaactggagaagataacaaagcttaaattgtttcataaccatatgaccattgaattggtgtctccttatttcagctatggtacaccacaaggcaaaagactggttaatctgttccgtcaggagatttttgaagaagtggcgaagagtgacctaccgggtctgatttttacatttgtatgggcttttgacctgaagcaagacggagagtacattcgtcaaatcagcgacttattcgaatctaatggaggacaggtctgttatgtggaactggaggctgatgcatcagaaagactggagcgtaacaagagtccgcatcggctgctgcataagccaacaaagcgagacatcgcgtggtctgagcgagatttgcttgatacgatgaagctatatcgattgaattcggaaccgggagaaatcaagcatgagcactacatacggattgataacacacacaagagtccggatgaggtggcaaagttaattcaggaacgatttaatttgtaatctatgaaccgtttatcttagcagagtagatattttatatgagaggggcattacatcatgtactttgttttatttttgctcataggacttgttctatgttatttgatcccattcggtccgattttggctgggggcattgttttcgcacttgtgatagatcattaccgtcagacgatgcatatgcgtgaagatatccgggatattaagaatcacctgggcctaatgaacaaaggcgacgcgcaggagtacgaaatggataaagaatacactcaagtcgatcgtttggattcagaagaaatggacatgattaatcgaaaaattgaagcagacctggagaaagacaacaaaaacaataaaccgtgaatccctgtaaaataattcttgatttgctcactcctgtgagtatatttacctagatcaggagtcatgctaattcgatattaactttttgttgcactgtgtagaaatttgtaatattatgagggaagcgcgtacaacatatcgggttgtaactgttgaatcaggcaaagccgtataccttgagaaaagggattggtttgtctttttctgtatattggagtgataaagtgaaaatcgagaaggtgctgaacaataatgctgtagttgcaatgaatgacgaacaggaagttattatcattggccgggggattgcttatcagaagcgggcgggtgatatggtttccgagcagcatatcgacaagatatttactttacagaatgaagatattcaggaaaacttcaaggcattaatctcaagcattcctctggaatacatgaaagtatccgaggaaatcatcgcttacgccaaattaaaacttggtaagaaattaaatgagagcatttacttacatctcacagaccatattcactttgccattgagcggtatcgcaagaatctgcccatacgtaacggtttaatctgggagacaaagcagttatacaaagaggaatatgaagtcggaatggaagcgctcaatatgatctgtgatcagtttggtgtgatcttgcccgaggacgaagccggttttatggcacttcactttgttaatgcagctttgaacgaggaaatgcccaacatcaagagtatgacgcaggtcatgcaagaaatcttgacaatcatcaagtatcatttcaagattgattttgatgagaactcactgacattttatcgctttgtgacgcatttgaagtttttcgcccaacgtttggtgaagggaaaacattacaagagcaacaacgatgatgaactgttcctgatgattcagaaaaagtatccagcagcgcacaagtgctcggagaaaatcaagaaattcattgaaagcaactacacgtatcaactaactgacgaagaattgatgtacttaacgattcatattgagagagttgtgaatgcaacttctgaataatcccatagatcagcttgcagggttgcaaccactagggcaaaacctgaacgcttgaatgacagaacattccgttaaccggatgttccatacattcagatgttcaggtttttttattctctccaatatgctttgaatccgtgtctagccagaaaggaagaaaagacttcatgaaacacgagcaattagccaaagacattctgtctggcgttggtggaaaacagaacattaacagcgtggtgcactgcgcgaccagacttcgtttcaaattaaaaaatgacaataatgccaaaacagacgaactcaaaaatctgcctggagtcataacggtaatgcaaagtggtggacaataccaagtagttgtgggtaacgaagtgtctgatgtgtataaagccttgttacaggtgggtaatatgaatgcggatgaaccggtctcaagtgatgatttagaatcttccggtaaaaaagagagtcttctgggtcagtttatcgacttgatctcaggtgtatttacaccaattctcggattgcttgctgcaacagggatgatcaaaggtttcctgtccatgtttacttctctcgaatggctggacccggcttcagggacatatcagttgttgaatgcggcaggtgactgtctattctacttcttcccgatcttcctgggttacacagctatgaaaaaattcggtggatctccattcctcgggatggccatcggagcatcacttgtatatccgaccttatccggtcttagtggtggggaaccgctctatacgctgtttgcaggcacattgtttgaatcaccgattcatatcacgttcctgggtattcccgttatcttgatgagttattcctcatccgtcattccgattattattgctgcttattttggagcaaaggtagaagcgttcttcaaaaagatcattccttctgttgtgagaacgttcctcacgccattctttacaattctgattgttgtccctgtaacattcctcttgattggtccaattgcgacatgggcaagtcagctgattggtgccggggtatcgggcatctatgacttgagtccgttggtaaccggtattgttgttggtggattgtggcaagtattggtgatcttcgggttacactggggtatcgtaccaattatgttgctcaatctgtccacactgaaagcagatccgattctggcaatgatgtttgctgcttcctttgctcagattggtgccgttcttggcgttatgcttaaaacgaaaaataccaaactcaaatcactgggtgttcctgcctttgtgtccgggatttttggtgtaactgagcctgctatttatggtcttactttgccattaaagaaaccatttattatgagttgtattgcttctgcaaccgctggtggtattattggcttcgctggttccaaaatgtttgtatttgcttcaggaatctttggtgttccagcgctgattagtcccacagaggggatcaactatgaattctggatggccatgattgccactatcattgcttttgtactaggttttgttctcgtttattttgtaggattcaaagatcctgctaatcctgaggcagccaaacaggctccagagccagtaaaagaagagaaggctgcacttgagcctaatccaaacaatcgctacgaaattgccagcccgatgacgggtgaggtggttcctttgcaagaaattaatgatgctacatttgctggtgaacatatgggtaaagggatcgctattcgcccaaccagtgggagagttgtatccccgattaatggtgtggtacagacgatttatcgtaccaaacatgcaattggtcttgtagatgatcaaggtgtagagattttgatccatatcggtcaggatacggtacaactcaaaggtcaacatttcactgcacatgtgaaagatggagatcgtgtgagtgttggcgatctgatcgttgaattcgatctgcaggccattattgaggcgggatatgagaccgtaacaccgattattgtaactaatacggctgattatttggacgtggttgctacaacaagtcgtgaagtgcaagaaaaggataaattggttacggttattggttaattctgctttagtgcgtattttattaatctgagcattagctctatagagaccactttgatgttttcgaagtggtctctgtttttcattttcggtcactcaaatgtatttgtgaaattaataaaaataagtgttgcaaacgtagttcagatgtactatgatgagttcaagaagtaagcgcatacatcaatcggattgtaactgttcaatcaggcaatgccgaccatcctcagttcagagggtatggaatgtaacttactttcgttatccaaataattaaataccaatgtgtacagccttacagggttgcaaccgttaagggcaaaacctgaattgctgaataacacgactgatttccggacgatccggtatgttgtgtatgttcagtggttcaggttttatttgtttcaaaagtcatggggagtctacttagagagggagaattacaatgagcaactacgatcaattagctaaggacattctgtcacgtgtaggtggtcgcgagaacgtaaacagtgtattccattgcgtaacaagactgcggtttaaactaaaaaatgaaagcgtagccaaaacggaagaacttaaaaatctgccaggtgttattaccgtcatgcaaagtggtggacaatatcaagttgttatcggcaacgaagtgccggatgtatataaagcagtcgttaaagtagggaatttcccaagtgaaggacaagtggaagaggaaacggacaactcaggcaaaaaagtagggttgttcagccgatttatcgacatgatctccggtgtgttcacaccactactcggtttgctggctgccacaggtatgatcaaaggttttaacgagatgtttgtagcctttggctggataactcaggattccggaacgtatcaattattgaaagcgacgggggactgtctgttctacttcttcccgatcttcctgggttacactgcaatcaagaagtttggcggttcaccgttcctgggtatggcgataggtgcatctcttgtttatccgacattgggcggtcttaaggcaggagatccactgtacaccttgtttacaggtacattgtttgaatcacctatccacattacgttcctgggtatgccggttatcttgatggactacgcttcatcggttatcccaatcattatagcgacatttgttgctgtaaaactagaaagattcttcaagaacgttattccgaaagtggtaagcacattccttgttccctttttcaccttgcttgtaattgttccagcgacttttttggtcattggtccaatctccacatgggcaggacaattgattggcgcgggagctactaatatttatgaattaagtcctattgttacaggattgattatcggtggactatggcaagtgtttgtattattcggacttcactggggactggttccggttgcattattgaatcttagtacgtcaggcgctgatccggttatcgcaatgtcatttgctgcttcttttgctcaaatcggtgctgtacttgccgtattactcaaaacaaaaaatacgaaaataaaaacactcagtgtaccagcgtttatctccggtatatttggagtaacagagcctgcgatctatggtgttacgcttccattgaaaaaaccttttattatgagttgtattgctggggggatcggaggcggtattctcggttatgcaggttcgaagatatacatgattggcggacttggcgtattcggttatccaacttttattaataaagaaacaggattagacttcgcgttctacatggctatagttgcttcattgattgcattcgttcttggtttcgtattgacgtatgtggttggattcaaagatccggtagaaaaagtagctgcacctgcaccagtacttgatccaaatccgaacagcagatacgaaattgtaagcccaatggctggtgaagttgttgcactgaacgaaattaatgacgtaacgtttgcaggagagcacatgggtaaagggattgcaattcgtccaaccagtggtagagtggtatctccaatcacaggtgtcgttcaaaccgtatatcgtaccaaacacgccattggtcttgtaagcgatgatggtgtagagatgctgatccatattggacaggatacggtcaagctgaaaggtcaacattttacaacccatgtgaaagatggagaccgtgttaacgcaggtgacctgattgttgagtttgatctgcaagcgattaaggatgcaggatatgagacggttacaccgatcattgtcactaatacttcaaattatctggacgttgtaggaacaaaagatgcatccgttcatgagaaagataaattgatcacggtattaagctaattcaaactaaggatagttaaggaggaactcctcaatgaatgaaaagtttacagccttcccggagaattttctctggggaggagcaaccgcagcgaatcaattggaaggtgcttatctggaaggtggcaaaggtttaacaacggtagatctgattccgattggtgctaatcgatggaatattgctctgggtaacctggattcatatgaaccaaaagcaggggaattctatccttcacatgaagccattgacttctatcatcgatataaggaagatattgcgttatttgcagaaatgggatttaagtgcctcaggctttccatagcctgggcacggattttccctaatggcgatgaagcggagccaaacaaagcaggcttgcaattttatgatgatgtctttgatgagttattaaaatacaacattgaacctgtcgtgacgatctgccatttcgatgtacctgtacatctggtcgagatttacggcgggtggaagaaccgcaagatgatcggtttctttgagaaatatgggacgacgctattcaatcgatacaagaataaagtgaaatactggatgacgtttaatgagatcaacatgttgctgcatcttccgtatattggagcgggaattgtccttcaggatggtgaaaacaaagatcaggttctgtatcaggcagcacatcatgaattggtagcgagtgcacttgctgttaaggcttgtcatgagatcattccggatgcacagattggatgtatgttagccgctggaatggtgtatccatacagctctaatccggatgatgtatggaaagccatggagaaagatcgtgaatcgttcttcttcatcgacgtacaatcgaagggagcatatccgggttatacaaaaagatttttcagagaaaatgacatttggattgacatgcaaccggaagatgcagatatcttgatgcagaacacagtcgactatatcggttttagctattacgcaagccggtgcaccagtacagaccctgagattttgaaagattcgacagaaggcaatgtatttggttcggtgaagaacccttatctgcaagcttccgagtggggatggaccattgatcccaaaggacttcgtattacatgtaatcagcttcatgaccgctatggcaaaccgttgtttatcgtagaaaatggacttggggcaaccgatgtgttgttagacaatgactccgttgaagatgactatcgtatcgaatatttgaatagtcattttgccgagatggctgaagcgattcaagacggtgtagagctcataggttacacaagctggggaccgattgacctggtcagtgcgggtaccggagagatgaagaaacgttatggctatatctatgtagaccgaaataatgatggtacgggcacacttcgcagagtgaaaaagaagagttttcactggtacaaagatgtcattgcgagtaatggcgcacaatatttctgatacaaggtctccggcgctatagaatagacaaagagcagtctcgttattacgggattgctctttgtttatgaggggatgaatttgacccatgatgtggctttcagatataatagaaaaattaagagaatcttgtcacttaagaagggaggagcatccactcatgaagaaaaaatcacttgcgtttatatcttcgggatatggatactccactgctgtctttttctagaatctattccaagggtgaagtctgcccaaaatcggaataaaactaggaaataacgcagaaaaatcttaagaatgatgaggtaatccagatgaatattgacaaaattactagaaaaaatccagcaaatatgccagctcctgtaggccagtacacgcatattacaagaatcccgaggaatgcagagttatttgtgacttcgggtcaaattggagcagatcataatggactctttccagagagtctgaatgagcaagtcacgaatacatttaataatattaaaacagtgctcgaatctgagcacttagatgctgaacatattatcaaagtgaacgtatgggcaaccgaggaaatcgattgggatttcttatatgccgagtggggacaattatttagtacggattatcctgcaatgacgattggttacattacggcgttaggtctaccagagataaaaattgaaatagagctttgggcagcaaaagtgtaacatcaaatactttttaaccaaacgaaggagcatctcacttacagatgccccttcgttttttaatttgtgaaaaatggaaaggatatgccctgtgtgcaatcatgagcgatagtaggtgtattatggcacctgcaagctctgataggcattcagtcgaccatatgtccagtagatcccggagcctgataccggatcagaagcgaaacacagcgcatcccgaatctgagcatttgatttcccttgtgcagcgagaagtgcagcggctccagccacatgaggggcagccatggatgtcccgctaaggtaggcataggaacctcccaggtatgtggatagaatggtatcacccggtgcagccatatccacccaggaaccatagttggagaaattggatttgagatcggaagggttggttgaagcgacagcaatcacattgggatacgatgcgggtacgattgggaacgaagtgttatcgttaccggctgcggcaataatcacagctcctcgctcccaagcatactgtacggcagcttgaaggaaagcatttcccatcggcccaccaagactcaggttaacaacctgaacaccgttattggcagcaaagacaagcccgttacctacattacctatcgttccttgcccgttgttatccagtacccggagcggaacgatggatgcgagtggtgcagcgcctgcgatgcccacaccattgttggtaacggaggcagcgatcccggctacatgggtgccgtggccgtggccgtcctcagggatgttatcataatcaacataatcataaccggggaggagcttggaggccaattctggatgattcagctgtacgccggtatcgataatggcgattttgacagagctgttactctgagtaatatcccatgcagcgggtgcgttgattttggacaggttatactgataaggaaagaaagggtcattaggagtgaaggatgcctcaacgaggtaattcggctctgcatgttcaataagctcatgatctttgtaatgtttcagaattctgtgcatttttttgcgggattccacacggtaccatcctaaatcttcataggtctcagcgaccttacatctcccttttttgtgaagggtgtgcatctcatcctcggttgtaccttccttgaatttgacgaagagttgcttgggagcgtgaggatgaaacttgctttcggcaagttggtccagataacgatacatgaacccgattactagcaaaatgaaagcaaaaacacctaaccataaccacatgagcgtttatccctccaatatgatttgtgacacgccttatcgtatgcgaactctatcagactgcgcgggcactcttgcaatttggatagtagtgtagatagattgataggaagggataaattcggtaagatgatatgaagagagccgctttggcatgaacaagatttaaggcagggccgagaggtaactcctaaatacagaggataaggaatgtggttttattgacacaacttcagagtataccgacagtcacaccagttcaggcacaccaaattcatgatgccattgattttgccatgcgtgtacgcagagaagtgtttccgatgatggatcatacgaaattgcctgtagacttcgagcagtttagagaacattatctggactccgatggttcgatctttcttgttgcaatgatggaggatgcgggcatcgtcggttctattgggatattaccatatgatggacgtattgaagctgtggaaggtcgatatgaagcccagtctgcagccgaaatagtaaaatgttatgtagatcctgcgtatcgcagatacggcattggttcgatgatgttaaaggaactggagaatgtggtgaaggatatgcactatacgacgctgtatttgcacacacatcgcttcttgccaggagccgtagatttctggaaacgccaagggtttacggttattgctgagcaggatgatgattggcaaaccgtacatatggacaagttggcatgtaagtgaccattgtaacagaaccgaaattttgaccacatttttgaaaaattgattgatgatactataactcttgtatacaacaacatagacatatacgagatacatgatggggggcataagaagatgaacgaaacgaagcgaaaaattgtttttattgatattgatggcacattggtcgacgatgatggaaacattccgttgtcagcacagaaggcttgtaaacaggccagagagaacggacatctgctctatttatgtacaggccgatccaaagcagaaatttatgattccatctgggatgttggattcgatggtctgattggtgcaggtgggggttatgtggagtttggcaaggacgtgttatatcacaaaagggtaacagcggaagatgttcgacatatggtcgattttttcaatgaaaacggcattgacttctaccttgaatccaattcggcattgtatgcgagtagcaatcttcaacctcacctggaacgccgtatctatggcgatatggagaatgaccctgtagccagagagaagaaggagctgaaaccgcacccgtttattgccggattaacgtatggtgaggccgacctgtataagaatgatgtgaacaaagtatgtttcttggagagctcagccatcccgtttgagcggatcaagcaagagtttgaagggaaattcgaagtcattcagtgcactgtgccgatctttggtgaaggaagtggtgaactgatgatccctggcattcacaaagccattgcaatcgccgatttgctgaagcatctgggcatgtcccaagaagatacatttgccatcggtgatggcatgaatgatgccgagatgttggaattttgtaacatcggaattgccatgggtaatgcaaagccaggtctgaaagccattgcagatgatattactggaacagtcgaggaagatggattgtatcatagttttgtgaagtatggattgatcacttgataaagaagacaaggtgagagagatcaaaacggttaatatgtacaccctttgtcccaaaccttattttagaccctgcatatattattgcagggtctttttttggtttaaacagatcaatttatatttttacaaaaggattctaatcaaaccataacatctaagtgaaggagagaatcgaaatggccattctatcaaccggacctatcgagaataatgccgtcagtgatgtacggccaacacaacaagttaccgttaaaattgataacaggaattctctggatggatccgttgttttgatacaagggtataatctgacctctacgaggactttatatgtcagcgagcagatttcaattgatccggatcaggtagtgacaagaacttattttgccaatcttgatgcatttgaatttgtctttacagttgaaggtgtagctatagagcagacagagatttccgtgtggggcaaaaatgaaaacggtcagcttgttgctgcacatcgattagtttcttccgaacttgaaatagagggggataatacgtcagtcaaccgcatatatgtagccaattttaatagtaatgatgtttccgtcattaatggcgatacgaatacggtcattgctaccattcctgtggggacgaatcctgcagggattgatgtcaatccattaacgagtcgtatatatgtcgcaaacagaagcagtaataccatttccgtcattaatggtgtaaccaacgcggtaattgcttctattccggttgggaatgagtcaggggacgtaggggtcaatatagcaactaatgccgtttatacagcaaattttaattcattggacatcaccgaagatgtaactgtcattgacggattaaccaatatggtgattgatgcgatcactattcctggactcaattttttaacgggtataggcgtcaattccttaaccaatcggatttatgcagttaattttaattctgatactgtctctgtaatcgatggagtaaccaatacagtgattgctacaatccccgttcaggtcaatccattccgtataggtgtcaatccagccaccaaccgtatttatgtatcgaattttaccagtaatacggtttccgttattgatggattgacgaattccgtcattgataccattccagtcggcgttacgccagctgaagtagcggttaatacctccacaaatgccgtttacgtacccaatcgagacacggataatgtttcagtaattagtggattgacaaataccgtgattactactgttccggtcgggaataatccaaacggagcgggtgccaatccgttaactaatcgagtttatataagcaatcaagatgacaataccatttctgtgatcgatggcgaaacaaatacggtgattgctaccattccggtgggggcacgtccgttcgcaataggtgtaaatccgtagaaaggtgaggggatttggatgaaagaagttataacggcatcagacttaatggagcagctgatcaccatgaacaaagaaaattctgtatgccaagttaggattccaggtaaggagaatcgtgagtcttgaatgatcagatcagaatggaacaggcatctcctcaatgggggtgtctatttgcattaaggagccaaaaaagaatgacgaatttttttccgttcatagaaatagatgcccctctttttgactttattattgcataactcctaatgaaagtttaatataaattttgaaaacaaggaatttaatggtttttgtttgtcgaagtgcatgaaatataaagttgatacatggaggatgctggatgagtaatgtagctctgttgtttcctgggcaaggttctcagatggttgggatgggtagagacttttggaataacttcgatgtggctaagaagttatttgaagaagccagtgatgccatttctttcgatttgagaaagttatgttttgaaggtagcatggatgatttgacaatgacgatgaatgctcagcctgcacttttgactgttagtgtcatagcatatcaggtgtatatgcaagaaatagggatggaacccgcttatttggctgggcatagtttgggagaatattcggctctggtctgcgcaggtgttctatcatttcatgacgccattaaactggtaagacaacggggtatcattatgcacaatgcagacccggatcagaaaggtaccatggccgccatttcaggtattcatttagatacacttcaaaacatatgtgaacaagtttccacgatcgagcgccctgcttgtgtggcttgtgtgaacgctaaccagcagtttgtcatttcgggacatcggcactctatacaagaaattattaaaaggacagaagccctgagaacgaaacattcgtatatcaatgtaagtggtccctatcattctcccatgatgcaaaccgcagcagaacaattcaaagttgaattggatcaatatcaatatgcccatgcaaaatacccggttatttccaacgttacagcagaaccctatgagtcagatcgatctgtcatggattacttaaacttgcagatgacgatgcctgtaagatggttagagtcgatgaactatttgattaaacagggagtcactgaagttgtagagttgggttctaaacatgtgttagttagtcttatgagtaaaataacgaagcgtattgtaccttactcgctaaatcagcctaccaatttaacaaagcttacaaatacacatgagagaaaaaataagctgttaacaattcgtaaagaatggttgtctgagctcatggtaaaagcactcatctcacggaattataacccagattcgatatcatatgccaaaacggttgagccattatttcaccaattacaacgggcaaaggaacaagtaaacaacaatgaatgtgaacttagtgaagaagagataaatgatgctctacaggtatgtcattccattattatagcaaaaaaaattccattggatggaaccgcgttcatcgatgcaatctagtacccgatctgttcttttgcaagatctatattacagcgacagactgcctttttgtaaggtagtctttttgtcttttaatgcatctgaacttgttgaagtttcagatatttggtaataaatatgtcaataactcacaaatcaatctctattttttaccatatagtaacaataaactgattgattttacatatatttctatggtaaaattttgcttgaaaatatgtgtaaataattagataagcatgttagagatgattcatttggaggagagatatgtatactaatcagtttcaaacactagtggatgttatccgcgacagaggtaaaataacggatcgcggtattcgttttatcgatgcggacaaacgtgaaacttttatatcttatcatcaattatttactgaggcacaagggtatttaggttatctacaagccatcggaattaaacctaaacaagagattatttttcagattcaagaaaacaaacggtttttagtcgcattctgggcttgtatactcggtggaatgatccctatccctgtaagtattggtgaagatgaagaacaaaacttgaaagtgtgccgtatttggaatttgctaaataaccctttcatgattgcatctgagaaggtgctggataagatgaagagatttgttttggaacatgacatgcttgatttccatcatcaattagaagtcagaacggatctgatccaagacaccatatatcattatgaatctattaataatatagttgaacctcagtctgatgacttggcatttattcaattctcttctggatcaaccggtgatcccaaaggcgttatgctcacccatcgaaacctgatttataatacttgtgctgctattaatggcacacaaattagttcaaacgatagttttctctcctggatgccccttacccatgatatgggtttgattggatttcatctcgtacccctcgtggcaggaattcatcagtacttgctcccaacggaattatttattcgcaaaccgattctatggataaaaaaagtaaatgaacacaaagcaaccatactgtcttctcctaactttggttataaatacttcctgaatttctttcgcgaagacaaagcggagggatgggatctgtcatctgtcagagtcatttataatggggcggaacctatattaccggaagtgtgtgatgaattcctaaatgtattgtcagcatatcacttaaagaaaacagccatgtttaccgtatatggattagcagaggcctctgttgctgtctcctttcccaaggtagatgaagaatttactgcggtgtacgttcaccgggatcatctgaacttgggggagcgtgtcatcgaagtcgagaaacatgctgaacatgtagcatcatttgttgccgttggcgaagcaattgattattgccatgttagaatttgcgatgaggaaatgaacagtgttcccgatttggttattggaaaaattcaaatcaagggggataacgtcacccaaggttattataataattcactagcaacggagaagttattaacgcacgacggatgggtgaatacaggagatctgggtttcatcatgaacggaaaactggttgtaacagggcgggaaaaagacattatctttatcaatggtaaaaatgtatatccccatgatattgaacgtgtcgccatacaattagatgatattgaactcggaagagttgctgcttgtggtgtgtatgattcgaatagtcaaagtgaagaaattattgtgtttgtcgtatacaaaaaaaagatcgaacacttcttgccgcttgttaaagaaatcaaaagacatctatataaacatgggggatggagtgtcaaagaggtactgcccatcaaaaaattacccaaaacaacaagtgggaaaatccagcggtatcagttagccaagcagtatgaagcaggcaaattctcaacagaatctgcattcatccatgactggatcaagaatgacaatgacaaggcaaaagaaaaggctgctgtttcggttcgagtcatagaacgtgaattaacttcactattttctgaagtgctggttgggaaaaaggttgaacttgaggatagctattttgatatgggtgcaacttcattacagctggcccaaatcgctgaacgtatagaacaaaaatacggagaagagcttgctgttacggacctctttacctatccctcgataactgaattggcagcatatctggctagaggctacagcgagaccatgcaagtcaacaaaactcaagaggatcatacgccatccaaagatattgctattatcggtatgtctttgaatctccctggtgcatcaaatgcaagcgatttttggcgtgttttggaaaatggaacgcataacattcgggactacccggaaagtcggataaaagacgcagcggattatatacaatccatgcgaagtggaatgagcgaagttcaatggatcaagggtggttacttggatcaaattgatcaattcgactattctttctttggcataactccaaaaactgcacaatttatggacccgaatcaaaggatgttcttgcaaacggcatggcatacgattgaagatgctgggtatgcaggggaaggaatcaatggaagaaatgtgggcgtgtacgtggggtattccaaagttgggtatgattacgaacggctcgtgacggcgagttaccccgcagaactcaaaaattatatcattggaaatttaccatctgtactggcgggcagaattgcatatttcttgaatttaaaaggcccggccttaacgattgataccgcttgttcctcctcacttgttgctgttcacatggcatgtaaaggattgctcgccggagactgtgaaatggcaatcgcaggaggcattcgaacggcattattaccgataagtatcggactggatatggaatctccagatgcattgacgagaacgtttagcgaagatgccaacggcacgggatttggcgaaggtgttgggtcggtcatgttgaagccaatgcagcaagcgattaaggacggggatcatatctatggtgtgattaagggaagtgcgattaatcaggatggcaagacggtaggaatcacagcacctaacccggagtctcagaccaatgtgatcgaacaggcatggaaagaagccggcatttctcctgatacgcttaactttattgaagcacatggaacagggacaaaattaggtgatccggttgagttcaatgctttgcgtaaagcttttgagaaatatacggatcggaaacaattttgtgcaatcggatctgccaaagctaacattggacatggttttgaagcggcggggatcgctggattaattaaatctattcttatgtttcaacatagaaagattccaccattggttcactttgacaagcctaatcccctgcttaagtttgaagcttcacctttttatgtgaatcaggaattaatggcttttggtgaaaaagagggtccattaagatgcggggttagttcttttggtttcagtggtaccaatgcgcatgtggttctcgaagaatatgttccttccccaaccatagataaaagaatgtcccaagagcctcatttatttgttctgtctgctgccacggaacgggcgctggatgaattggtcagaacgtatcatgaatatctaaccgatcacacggatgtttccattcaacaaatctgttatacagccagtacgggaagggctaatctggattatcggcttgccatcgtagtcacgagtacacaagaattacatgaaaaattgaaacgaattgcaagcggagaaggtaaactgccaaatgtttattttggttatgccaaaaaagacaaaacgcttgttagcgatcatctctatgctcggggaaaggcagaatctttaaatgaactcggtcagttatttacacttggggcagtgattgattgggaaaggttttataatcatgaagtcattcggaaaattccattgcctctatatccatttgagcagaagcggtgttggattgaagtcaaacatacgataccagcggaacataggtcagagaggaatgaggttcaaatggagatgaatacaaacggtattgaattaaagattaaaacaagcatcagtcgtgcatctggtttgaagttggaagagctggatcatcaagctcattttctccaaatgggattggattccatcattcttgtgcaaattcagaaggagatctcagagctgttccgtttggatatcccgatggaaatgttttttgaaacccttacgaatattaattccttagttaaatatgtgtcagagaatataaagcatcatgatgtatctgaaaatataaacaatcaaatagttcaggagcatactgaacaacgaaatctggcatctgtgaacaatataaacacggcaaaatcatcagggaatgtgtcggaacaaattgtgatgtctgccattcagctcatggaatctcaattaaaaagtttgaatgtgctgttaggcgagcaaatgaatgctgttcaatcgcctcttttggagatgaaacatcatgaaaccaaacatcatgaaaccccaaaagttcaagcttcaccggtaatgaatgaaatcaataaaaccaacgaacccaaaaagatccaaccggattcggaatcgaaggaagaaaaaaaaccttttataccgtatcaatcgttgaaaattcatgaagagagtggattctcagcgcttcagaaccagtatattgaacaatttgtaacaaagtataccgcaagaaccaaaggctccaaattaaaaacagaccaaacacgtttggttcatgcgaataatcgcaatgtgtccggatttcgctcgtattggaaggaaatggtgtatccgattatttcaacacgtgcagagggagctaagttatgggatctggatgggaacgagtatttggatctgacgatgggatttggtgtaaatctatttggtcataatcccgcttttattcaaaatgtaatagcagacagcctccaggaacaattgcctccattgggccctatgtcagacttggcaggagatgtcgcagctaaaatttctgagctaacgggtgtagagcgtatcgcattttataattcaggaacagaagctgttatggtggcacttcgtttagcgagggcagcaacagggcgttccaaagttgtattattttcaggatcttaccacggtacacatgacggcgtgttgggtgtagcaaatcctggggatgctttatcgtctgcgctgcctatggctcctggtattgtacaaagctcaatggatgatttgattattcttaattataaccatccgcaatccctggaaatgattcagaacttgggtgatgaattggctgctgtacttgtagagccggtgcaaagtcgaagacctgatatgcaaccaacacaattcttacgggaacttagagagatcacgaaacagtttggcattgcacttattttcgatgaggtcatcactggattcagaattggtctgggtggggcacaagattggtttggggttcaagcagatttggttacgtatgggaaagtggtcggtggcgggctgcctattggcatagtcgcgggtaaagctgaatttatgaatccggtagatggtggaacctggaactttggtgatgattcttacccttccgacgcagataagaaaacgtttgtcggtggaaccttctgtacacaccctcttacgatgagagtgatgttaacggtactacagtatcttcaatctgaagcagaaaccttatataaggaattaaatgaaaaaacagattatcttgtaaaagaattaaatgcgtttttcaaaacagcgaatgtaccgatgcaaatggtgaactatggatctttatttcgatttatatcatttggagatatggaattattcttctaccatttaatttataaaggtttatatatttgggaaggtcgtaactgttttatatcgactgtgcattccatgggtgacatggatacgataatcagaatcgtgaaagagacgatccatgaactacgcgagtgggggtttatccctggtgaatcgcctgtttcggaatatccgctctctttagagcaaaaacaattattgttaacttcattacatggggaagatgcgaatgctgcattaaatcagagtgttattttaaaaatgacaggtggaataaagccttccacactggatcaggccgtgaatcagatcgcacagcgtcatgaagccctgagaacagtcattcatgccgatcgtgaaacacaacaaatcagatccgtaatggaacttcaatgtacatggttggatttctcagcatatgcgggtgaggatcaagaacgggaaatttccaattggttatctgccgatgcaaatgaagccttcgatttacagtctggggaacctctatttagaatcaccttgcttaaaaaggcaactgatcaataccttatggtgctgacatttcatcatattgttgtagatggctggtcgattgctgtattcattcaagagttggaacatacctattctgctctggttcgaggagtttcggttcaattacctgaagccactccattccgagcgtatttaagctggcaacgacttgaacatgaaaaagggtcatttaccgaagggattcacttctggaaagaacaattttccttatcctatcccaacattacacttccaacggcaccgtccgatgatgtgcccaagggatatgacggtgaaaggtattccatcaagctggatcatcaattaacagagtcattgcgaacgttaagtatcaataataagagcagtttatttgtaacgatgtttgcagcgtttcatttatatttgcaacaacttacaggacagtctcaccttgtcatcggcgtgcctacagcgggtcagtctcatatacgaaaaaatgcactgattggcaactgtgtcaacattgtacctgttcatcatgccttgttaacgaagcaatccgttgtagaccatgttcttcagctcaaggaaacgctggctcttgtcatgaaacatcagcatgttccattgaccctcgtatccgaacagcttgctcatatgactgcaccggatacccggattttattcaatatggacagaacgattcatcatctccaatttgaaaatatcaagactgaattcatgtcgtatccgatcaaacatatttcttacgatttatttcttaatattacggatgttagccatgaattgtacctggattttgattacaataccgagcttattggacctgagatgatgaaattgtggtctgaaggatttaagggtttgctgcaaaaaatggtgagtcatccagaggctgaagtttcgtctttgacgttgttctcatccgagcaacaggaccaattacaggaaatatataatcggtttgttacggagcgtcttcctcacgttaatcatgcagccatattcgagtctccagtcaatgacgtggagaaaaagctggctttgatctgggaggacgtattatccctcgatcaagtggggagagatgatcacttttttgatctcggaggtaactcgctcaaggcgacagtaatgctatccaaggtacatgaacagtttcaacacaaaatttcaatcgttcaattcttccaaaatcaacgtctgaagcagctggccagtctgattacaggcgagaacgaggaaacattcattccgattaaggcattggacgtcaaggaattctatgagacatcatctgcacaacagcggatctactttttggatcaatttgagccgaatagtgtgtttcagaacatgtgcggccatattacggtcacaggaaatatcgatgaagctaaattgatttcgtcattggaacaaatcgtgcaccgtcacgaagcttttcgcaccagtttccatctgatggatggagagctttaccagggtattgctccaacgattgattttgaagtgaaacgatctcaggaaagttctgcttcattcgaacaacatgttaaggcgtttgccaaaccatttgattgctccaaagcaccattaatacgtgccgaattcattcgtgtaaacgatgatcatgcagagattctcatcgagatgcatcatattatatcggacggatattccgttggcattcttgcgaatgaactgatcgatgtgtatgacggaagaagcatgtcggaaattgagattgaatacaaagactttacagcttggcagaaagaatttctggcgggggagtcttataagcagcaagaaaaatattggctggatcaattcaaaggagaactcccgaaccttaatctgcctactgattttgttcggacacctcatttgacttcggcaggttcaagattgtcatttgtgttggatcagcatttgaagcagtcgctggaaaagcttgcgaaacaaacgggaactacgatgtttatggtgttattggcagcgtataatgtgctgcttcatcaatacacagcacaagaagatatgattgtaggcacgccaacatcaggaagaaaccatccggatgtcgagaatatgataggtgtctttatccagacgttagcgattcgctcacagccggtggggaataagtcgtttcgatcctatctcgaagaaattaaaaaacaatccctggatgcattggataaccaggactatctttttgacaatcttgtagagaaattaaacacacatcgggataccactgggacagcactttttaatacgatgtatatcttcttaaataccgcgttgaatcaacggcaagaacaggattgcagctttaaagttagagaattaaatgtcggtgtatcgttgtatgatctgatgttcatcgttgaggatgataacgagtgtctggaaatgcactttaattacaagacggagctgtttgaacgggataccatcgacagaatgaaaacacatctgttcaacatcctcagagacattgtgatcgaacctgatattgccttgtccgatattcaaatgctgtctgaacatgagcaggacgttcttttatatgactttaatgataccaacatagaatattcccgggatcagaccatacaggagttattcgaagcacaggtggaacggacacctgatcaattggctgttagttttggaaatgagcgatggacgtatcgtcaattgaatgaacgggcgaatcagttggcatatacgcttagagctgagggagtgcagcaggatcaatttgtaggtattctgacagatcgttcgattgatatgatcgttggcatctttggcattctaaaagcaggcggggcgtatgtaccgattgatccggattctcctgaagagcgtatccggtacatcctgcatgattcggggacaacactattagtcacgcaaacccatctcaagcagttggtatcattcaatggccaaatcatggatttaaacgataaagaaacctacgcagctaatctgtcgaatctggaacccgcagggaattccgagcagttggcttatgtgatctatacttcaggcacaacaggcatgccaaaaggtgtgatgatcgaacatcgtcaggttcatcacttggttaaagcgttgtacagtcaagttatagatgatcagcatagcggtttgcatgtcgctctacttgcgccttactatttcgatgcatctgtgaagcagatttttggcgcactgctgtcaggacatgctttgtttattgtagacaaggacacggtactggatggacaagatttaatgaattattaccagcaccaccaaattgatttgacagacggaacacctgcgcacctgaaattgctttcgaaggcaaaaaacgttcaaggcatatcgctaaaatatatgctcattggcggtgaagctctttctcagcaaagtgtaaatgaaatcacatcattatttgctctcaatcatataacgcctccaaccataattaatgtgtacggtccaacagaatgttgtgtggatgttgcgacataccgtgtacttccagaacacctggatacagcgaatcaacgagctcacctaccgattggtcgaacactaggaaataatcgcctgtatgtattgaacaaacatggcaaagttcagcctgtaggcgtcgtaggagaattatgtatctctggtgatggggttggtagaggatacttgaatttacctgagctgacagcagaaaaatttgtacgtgatccgtttgtccagggagcgacaatgtacaaaacgggagatttggtgagatggcttcccgatggccatatcgagtatttgggaagaatggatcaccaaattaagattcgcggataccggatcgaagtaggagaagtcgaagcagcgctgttagatctagagtgtgtgaaagaagttatcgtcgttgcacatgaggatgatcacggggacaaatcattatgtgcatactttacagcggattccacgctgacggtgggagagttaaaacaaagcctctctaaggtgttgccgaattacatggtaccagcctactttatacaattggatcacatgcctctgacatcgaacgggaaaatcgatcgcaaatcgcttccgagtccagaagaaaacatacaaacgggaagtgaatatatagaaccccaaactggggtggaaaaacagttgctgcctatttggcaggatgtgcttgccgtgaaaaaaatcagtgtaaaagacagtttttttgatgtaggaggcaactctttacgtgcgaccaagctggccgccaaaatcaatcaaaagctgaatatccacatatcggtaagaaacgtctttgaatggcagaccattgaacagatggctcaatctattgaacaaatggaacaggaagtatcagtttccattcctcaagtggaggaaaaagaatattatcctatttcttcggcgcaaatgagaatgtacattatgagcatcaaagctggcaaggaactcatgtacaacatgtcaggtatgtttatgttggaaggatcgcttgatcggaccagattggaagaagcattccaacaattgattcatcgtcatgaatcgcttcggactggattcaaagtcatacacggagaaccgaaacagatcgtataccctaaagttaactttggaattgaattgatcgagtcaacggaagtagagatcgaagatcgaattgaacagtttgttcgcacatttgatctcgggcaagcacctcttatgagggtgggacttattgaacttcaccaggagcgtcatgtattgctggtagatctccaccacatcattgcagacggactatccgtgcatcttctgatgattgaacttagccagttctataagggagaggagctgtctcctcttcgaattcaatataaggactatgctgaatggcagcaaatgcaacttcatagtgagtggatgaaaaagcaggagaagtattggcttactgtgtttggtgaaagtatcccgctattggatctgccaacagactacgaaagacctgaaacgctaagctatgcgggagatgtattggacattgttttgcaggaagacatccttccaggcttgagaaacatggaagcacggacaggaacaacgttatacatgattctattagccgcctataccattctgttgtccaaatacagcggacaagaagatatcatcgtgggcacgccgattgcaggaaggacacatgccgagctggagccggttatggggatgttcgtgaatacactggctattcgaaattatcctgcggcggataaaacttttacagagtatctgctggaagtgaaagaaaatatgttgaacgcatatgagaatcaggattatccgtttgaagaattgattgagaaagtgaatgtaaccaaagatgctcggcggaatccgttgtttgacaccatgtttgtattgcagaatacagatgcttcagagattcagatggatggagtaacctgtaagccttatgctccaaatacgagagtatccaaattcgatttaacgttgtatgttaccgaattgcaacacaagttagaagtggcctttgaatacagtacgattttatttgagaaaacaacgattgaagcgatgtcacaaaatctgttggtcatattaacaaccattgccaaagaccctcatattgaaatcaacaagattcaattggttgaagaattaataaatggggatacgctggctgatctaattgaagtagatttctaaaataactaaaaatataaatgtgatcggggtgccgtatgtctatttttaagaaacaggaatcgtattgggcaagccgatttgaagatgatgatcatcttgttcatttgccttattgcaagacaacctccaaacacccagacgatacgcagcaccagaatgatatatataagcctatgtcagccgatgtttcacataaaatcaagtccatgtcgcgaaatgctcctatggcgatatatacgatcttattaacaggagttcagtgtctgttatataaatatacgaatgaaaccaagatgattattggtataccaacgatggaagaaaagaacaatgatctatcgctctcgaataaggttcttgtcttaaaaaataatatcaatcatgcgatgtcattcaagtccttatttaatcaagtgaagaccagtttaaccgaagccattcagcatcaacgaattcctttcagaaaaatggttgaacgtttaaatgttcagtatgattcgaaccatgtacctctgattcataccttggtttcgttgaatgaaattcatcctgcccttgatgaaaatcacgtaaaagcggcgacaatgttccactttgatctggagaacgactccattcagttaagattagtttatgatgatgatcgttatgatcgcgattatatagttcaaattgtagagcaacttgaccaattgttatccgttgtgctgaaccaacctgatctggagttaagtcatgtcgatatgttatcggagtttcatcgaaacaagctgttatatgactttaacgatacaagcgtggggtattcacagaacaagacgatgcatcaattatttgaagaacaggtggaacgaacaccggaccatccggcagttgtatttgagaatagacagttaacgtacagagagttaaatcaaaaatccaaccaattggcccgattgcttcaagctaagggggtgcaggcaggtcagttcgttggcattatggcagagcgctcacttgagatgatcataggtttattcggtattctaaaagctggcggggcatatgtcccaatcgatccggaatatccggcagatcgtattcattacatccttgaggattcaaaagtggcttggttgctgcatcaaagtcatatagagaagccggaacattatgcagggacatgtgtcattctggattctgaaataaatcactatgaggatcatttaaatttggtagatggagcgatctccagtgatttggcatatatgatctacacgtctggaacaacaggtcatcccaaaggcgtaatgattgaacatgccagcattgtgaattccctgcaatggaaatcggatttttatcattttaccggagatgatcgggtattaatgctgaatcctttcgtttttgattcatttattactcatttctttggtccgatgatatctggctcgacagtgtatttgttaaaccagcaacagtgtaaagatgctatagccatcaatacgatggtcaaaaaacagcaaatcacgcacatccaaagtccacccagtttcttgatgaccctattggaacaagtaagtgcggaagattgggcatccatgaaaaatgtggtggctgcgggagagaagattgttcctgccttaatacacaaattgcagcgcatcaatccacgcatcgaagtgtgtaatgaatacggtccaaccgaaaatagtgttgtatccacagttctgtcgatcaagtcggcagatcaaaatatctcaatcgggaagcctattgcgaacaatagagtctacattttaggagaacggaatgaattgcagcctattggagttcagggagaattatgtgtagccggagcagggctatccagaggttacttgaaccgtccagatctgactgcggagaaattcgtggatgatccatttgtttcgggagcaaaaatgtacaagacaggtgacttcgcaagatggctgcccgatgggaacatagagtatataggaagggtagatcatcaagagaaaattcgtggacaccggattgaacttggtgaagtggagacagctcttctaaatagtacccagataaaagaggccatcgtcatagccagagaagatgaaacgggaaccaaacaattatgtgcgtacctggtaggagaggatgcaatcacgatcggggaactgcgggaggcgctgtcccagcagctgccaaactacatgattccgtcctattttgtacagctggatcagatgcctctcacgtccaacgggaaaatcgatcgcaaagctttgcctgctcccaaagaacatatgttgaagagcatggagtacgaagcaccccgaacgatggtggaacaacaacttgtatcgatctgggaagaggtacttggggtagagaacattgggattttggataatttcttcgagcttggaggagattcgattaaatccattcaagtttcttcgaggttatatcaagcaggttaccaggtgcagatggatcatttgtttaaaaatccaaccatagcaagcttgattccctatgttcaacccataagtaccctgtcagaacagggaatcatcactggaaaagtgatgctgactccaatccagcattggttttttgagcaatacaaggtagatgcccatcattataatcagtccgtgatgttgtatcggaaagaaggttttcatgaagtcacacttcgccgtgtatttgataaattgagtgagcatcatgatgcacttcgtacagtatatcgtcttacagaacagggttatgaagcgtggaatgaagggttggcaagggaatccttatatacacttgaagtgatggacttcaagtcattagcagatccgtctcaagaaatcgagaagaaggcaaatgaaatgcaaagcacgtttacgttggaacgtggacccttgatgaagctgggcgtatttcaatgtgcagatggagatcatctattaatcgttattcatcacctcgtcatcgacggggtttcatggcgaattttgattgaagacctatccagaggatatgaacaattaagtaatggagaatcgattcaactaccgcaaaaaacggcctccttccaattatgggcagaacagcttcaattgtatgcgaacagtgatgcgataacgaaagaaattgcatattggaatgaaattgaacaagcaagctataagccgttacctacagatttcgaagcggatcatgcactggaaaaagacagcgaagaaatcacgatggaatggtcagcggcagaaacggagcaattattaaaacaagcgaatcgtgcttataaaacggagattagcgatttgctgctccatgctttaggcatgtctattcaccaatggacgggcatggataaagtgctggtcaatctggagggacatggaagagaacaaattttaccggatctcgatattacacgaacgatcggatggtttacgagccagtatccggttgtacttgatatggaagcaagttcaaatatgtctcttctcatcaaaacaaacaaagaaatgattcgtcaaatccctaaaaaagggattggttatggtattttacgatatttaagtgcacatcagcaagaaacgccctttaccttgaatcctgaaattagttttaactatttgggacaatttgatcaggatcttcagaatagcgggatgcagatctctccctatccaggcggagcaacagcaagcgacaatcacagaagaaatgttcttatcgacatgaatgccttaattgtggaaggcaaattgacgttgtcccttcggtatagtcgcacccaatatcaaaaagaaacgatggagcgagtggcaacatattttagagatcatctgcaagaaatcgtgatgcactgtgtgacaaaagagaagccggaatgtacaccaagtgatctaacgttaaaaggaattaccattgaagaattagaaggatttgttcaagaatcggaacacattggtgaaatcgaagatatatatgctttatcaccgatgcaaaatggaatgttctttcatcatttgcttcattcaaaatcggaagcgtatttccttcaaactacgctggatcttcatggtccgttagacgtggaagcatttacgaagagtctggatcagttgatgcagcgtaattcgattctcagaacaaattttcatagcaaatggaataatggacctctgcaagtggtataccgtcataaacggaatgggctaacatacgaagatttgcgtgagatgaatgaaaaagatcgtgaagcatacgtggcagaatatacaagagcagataaaataaaaggtttcgacctgtctcaggatgtgttaatgcgtatttcgatcttgcaaacgcatgaccaaacctatcgtttcatttggaattatcatcatattttgatggatggctggtgcctgtctcttgtaatccaggagttgtttgatggatactttgctattcaggaacaacgaaaactggaggcaaagagtacgattccatacaaacactatattgaatggctggacaaccaagatcatgaagaatccctgaaatactggcgtgactatctgcaaggttatgatgagcagaccactttgccaaaagaacattcaattacgaagagtgatgaatatcattcagagcatatgatttgtacacttagtcaggaattaaccggacagctcgcacaagtggccagtcagaatcaggtgacgctgaacacgttcatgcagacagcctggggaatgttgctacagatatataacggcagtgaggatgttgtattcggaagcgtggtgtcgggcagacctgcggcgattgttggagttgagcgaatcattggtttattcatcaataccattcctgtacgcgttcagactcaaggtaacgagacatttgcagcgattatgaagcggaatcaggaacatgctgtcgcttcgcatccacatgacacgtatccgttatacgagattcaagcggaaacatcgcaaaagcaaaatttgattgatcatatcctgatattcgaaaattatcctgtacagggcattatggaacagtttggggatcaggaggagacagctcttcggattacgaatgtagaagcagatgaacaaacgaactatgactttaacctgattattaaaccaggccaatccatgaaatgcatgttctattacaatgctaacgtctatgaccgggcaagcgtagaacgcattcaaggtcacttgattcagatgttggagcaagtggtcaacaatccgaatattccgatccatgacattgacttgaccacaacacaggagaaaacacaaattttggaacagtttaatgattctatggctgaatatccaatggacaagacaattcatggactgtttgaggaacaagcagtaagaactcccgaaaacgttgcggttgtatatgatgatcgacatttaacctatcaaacgctgaacgagaaagccaaccaattggcaagaacgttgaaggctaaaggcattcaaaatgatcagttaatcgggatcatcgctgatcgttcgctagacatggttgtaggaatccttgcgattttgaaagcgggtggcgcatacgtgccgattgatcctgaatatccggaggatcgtataaactacatgcttgaggattcgggtgtacatgtattattaatgcaaagtcatttgcaagaacgcatctcttttgcaggagaggtcgtttgcctggatctacttgagtcctatcatgaagatcattccaatttgggaatgactgctacaccgacaggcctggcatatgtaatttatacctcaggaacgacaggtaaaccaaaagggacatgtattgaacataaaaatgtggtgcgattgttgttcaatagtaaaaatttgtttgattttaatgcatcagatacatggacattattccattccttttgttttgatttttcggtatgggaaatgtacggagcattgctctatggcggaaaactggttatcgtacctcaaatgacggcaaaaagtccggaacaatttctacaattgttaaaaaacgagcaagtgacgatattaaatcaaacgccaacgtatttctatcatcttcttcaggaagaactggcaggtcatacagcagatctgaaattaagaaaagtgatttttggaggagaagccctcaatcccgtgttattgaaggaatggaagctgaaatatccatttatccagttaattaatatgtatgggataaccgaaacaacggttcatgtaacttataaggaaataaccaacattgaaatacatgctggaaagagcaatattggaaaaccaatcccaacgttgcagacctatattttggataaacatcaacgcattcaaccgatcggtgttcagggagaattagttgtagcaggtgagggacttgccagaggttatctgaaccggcctgatttaaccgcagagaaatttgttgatcatccctggattacaaaagggaaaatgtatcgcacaggagatgccgcaagatggctgccggatggaaatattgaatatctgggacgaatcgatcatcaagtgaaaattcgcggttaccgaattgagcttggcgaagtggaaactgcgctattgcaaataaactccattcaggaagcggtcgttattgcccgtgagcatgaggatggttcgaagcagttgtgtgcgtattggaaaggcgacagctcactgacagcgaagaaaatcagaatggcattatctcatgaaattccggattatatgatcccgtcttattttgttcaattagagcatataccgttaacttccaatgggaaggttgaccgtaaggcattgccatctccacaagaacatatgcaaaaagggaccgagtatatggcaccacagaacgctgtagaacaagcgatcgtcgctgcctgggaagctgtgcttggtgttcaaaaggttagcacatcagatcatttctttgaactcgggggcgattcgattaaatgtattcaagtttcctcacgactgcttcaagcagggtataaagtggaaatgaagcatttcttcacctatccgacagtagcggagttgagtgaacacgttacttccgtgagcactatttctgaccaaggggaagttacgggacaagtgatgctgacacctgttcagcgctggttctttgatcaaaatatggtggacgcacatcattacaatcaggaaatgatgttctttcgtgaaaaagggtttgatgttcgctttattcacagcatcatggataagatcgtgaaacagcatgatgctctccgcatcctttatcgacaagctcctgagggcggatatgaagcgtggaatcgaggggcagacgaagaaggattatacagccttgaaatcgttgacctcaaaacagaagcagatcctgcatcgttcattgaaaataaagcaaaagaaattcagagtggtatggatctgtctcacggacctttgatcaaacttgggttgttccaatgtgctgaaggggatcacctgcttattgccattcatcatttgttggtagacggggtttcatggcgtattttatatgaagatattcagacagggcaagaccagttcttaagaggtgaagaaatccggcttcctcaaaaaacgacctcgtttaaacaatgggcagaacaattgtcgacgtttgcagacagcccggcgatgaagcaagagaatccatactggagtcgtgtggagcaggcccagctaagcccgctgccaaaagatatggattgtgatgagacgattggcaaagatagtgaaacgatcacccttcattggacagcagcggaaaccgagcaattattaaagcaaacacatcatgcgtaccatacggaaattaatgatatattgctaacggcattaggaatggctgttgatgattggacaggcatgggagaaatcctcgtaaatctggaagggcatggtagagaagacatcctgccagagctggacattacgcgtacagtgggatggtttacaagtatgtaccccgttatgattacgatggagtccggggctgacttatcaaggaagattaagaccgtcaaggaaggactgcgccagatcccaaccaagggcattggttacgggatttcgaggtatttgtcacatggaaatgaaggattcaagttagagaaaaatcccgaaattagtttcaactatatgggacaggtgaatcaggattcgggccaagatggcattaaattctcgccttattccagcgggccatccgtaagtgaaaacaacaagagaccttttgtgctgaatatcaatggcattgttacagagggtcggttgtcgttgtccattaactatagttcaaaacaatatcgccgggaaacgatggagcaattggcttgtctctataaggaaggtcttgatagagtcgttgaacattgtgtaaggaaggaacaaaccgagcttacaccaagtgatatttcatgcaagtcattaaccattgatcaattggatcaaatcgtggaacacactgggcacatcggtcgaatcgaaaatgtgtacccacttacaccattacagaaggaaatgttgtacgaaagtgaacggaatccaatttcgggcgcttactttgtacaaatcatgtttgatatgcgtggagatttggatgttacctcttttgcgcaaagtttggatcaattaatgcaaaggcatgcgatattaagaactaatttttacagtgatttcgtggatatccctcttcaaattgtgtatcaagagaagaaatttgaatttaactatgaagttgtagctggcacaagtgagctgcaacgtaaaacgtatgttgacgagtatatcgagcaagacaaggcaagaggatttgacttacaacgagattcgctaatacgtatgtctgttttacgaacaaagcatgaggaataccgcgtcatatggagttttcaccatattttgatggatggctggtgtatgtctctggtaagcaaagaaatatttgagaattactttgcgattcgggagaatagaaagcctcaagtgactctattaacaccttatagtcaattcattgaatggttggaacagcaagatcatcaaggtgcaataacgtattggagtcattaccttgatggttatgaggggcaaacgaaactgcccggagaaaaagtcaaaccgaaacatgaaagacaggattccagaacgctaaactgctatttggatgatgtactggtcgagcaaatgaaacagattgcagaacagcagcatgttactctccatacgttagtgcagacggcctggggtgtattgttgcagcaatacaatgaaagcaatgatgttgtattcggaagtgtggtatcgggcagaccgcctgtcatccctgggatcgaaagcatgattgggttatttattaatgcgattcctgttcgtatccaggctcaggccgatgagtcatttatatctctaatgaaaatgaatcaggcacaagctgtggagtcacatgcatatgatacgtattcgttatatgatattcaaaatctgaccaagcaaaaacaatctctgattaaccatgttgttgtatatcagaacttcccggtagagaaccgaatggagagtctgggccagaaaggtgaaataccgcttgagattatgaatgttgggggtacagaacacaatagttttgattttactttgattgtcaaaccccatgaaaatatgaaaatcatattgatgtacaatgccaatgtgtatgactcatctaccgttgaacagattcaaaaacactttatttccatgattcaacaggtggtaagtaacccggaagttaaaataaacgaacttgcgttgagtacgtcgaacagttattagacgtgaatggcaaacttcaacgaacctcagtaatgttatttcatcatatcagggtgtcagaacctaaaaatcgacccaatcgacggaataacgtctctgtgattcgttacatcacagacctgtgcaaatctgagcgaatagcgtgtaccaggttcattagaattaaataactttaataagggatgtcctcagtcatgctcatgacttatggcatcccctttttatgctccgttaatgatgatagctggaaaattactgtagatggagaaatgaagtctcttatgtgttccgatcaacattgtgatgtcaccaacgtggcagatcaactattgaaattgcgaatgttcattcaacagttcgtggaaacgaaagaatcctccgtatacattttgatcgaccttttaacaattcctccctcctaaccgatatataataagtacatctatgtaatcagaaagtgaaaggagtgcagaacatggatattgcagcattatcaatggcgatgagccaagcttcagtagtgcagtcggcaagcctgcaagtgatgtcgattacaaaagacatggcacagcagcaaggccagcagatggcggaaatgttgaagtcaatgcctgctcctcatcccaatctgggtagaagtctcgatctttcggtttagttgaaattacagcatgtgttcttatgtaacacccattgcagcaagcaaaacccaaacagctccaattcaaatgaattgaagccgtttgggttgttttattttaaatactcataccgaaattacgatctttttattacgatcttctcagcgaagctttgacaagcttggcaatctgccttcaaagggcagtgtgtccttcaatgtccataactcatcgtaactggaaatctgaagatcggctttggacaagtcctgattgcctgatcctggattacgatatccgatgcagcgcatgcctgcacttttggcggcttggacaccattgcgcgagtcctcgatcaccagacaattcgaaggggatgcaccaatcatctcagcggtggtcaggaaaatatctggtgccggcttgccgtttgtaacttcctcacctgtcattcgcacctcaaagtattgtccaagtccggttttgtccatgatcaaatcaatcagtgcacgtggagaggaagaagctaccgctatgggaatgtgttgctcatgcagccagcttaaccagcgttccacggaaggcattgccgtcagattcggatgggcgagcatcgtttgcatcacattatgctgatgataagcaaatatttcttccagcgtagctgtcagttgatgcttgtccaatacttgttgccacatggattccagcgtaactcctacatagttatgatgttcttcatcagtcacccttgctccaaaatgggtaaaagagctgcgctcaatctcgaaataaatcggttcgctgtcaatcagtacaccatccatgtcaaaaatgaccgcttgaatgatgtcatcattgggggctcccagtccgttagattctttgttcgctgccatgttgtattcctcctccaggattgtgtatacatatatctctaatgtaatccattcatggttaacgttccacttcagaaactggaaccgctggattgcagcacaactttaatggcatgtgaagaggcttgaagtgtgcgtccctgaatatcgcagccaagtgtacggaatgcctcttcgtaatcctccaacgggaaggagtgagtgatgattttttttgccggaataatcccttgttcaatcatataatgtgcggtagcaaatgtccccagagaatcgatggaaccaataattttcagactgcggtccacaacttccttgggattgaaggatgtgtttccatctctcagaccaaccagcatcaggtaaccgccgctagcgagctgggaaagtatttgtgtgcccacaacgcccgttgtatccacaatcatatcgacctgatgggttgcgggtgacagtgattctattgcattttcgaaggatgaatgaacttcccaacgatcaggtgcaatggaaccggcaatggctaagcgttcttctgagatgtcgaccagacagccggtaacccctttggaagcgagcgcgtagctgtacagaatgccaatcgggcctgcaccgaggatgattgttctgaaattcggcagtaaatgaatctgattaatcccggtcagcatacagctgagtggttccgtcaaagttgcttcttcatagctcacatgatccttcaatttgtacaaaaaacgatcctcggtcacataataatctgtaaatgttccgtcagcactcacacctgtctcggtaacagacttgtgtgtgcaatgattttgtctgcctgttctgcacatgtcacattgtccgcaataataggtagggtcgactacaacacggtcgcccggttgtaatgtcgtaaccgcagagccaacttcaatgacttccccggcagactcatgaccgagaatgacagaagggaccgcatgatatttgccgctgacaataccgagatcggtaccgcatacaccagttgctcgaatacgaaccaacacctgattatctcttgtaatttccgggacaggccgatcctcaagcgccacatcccaagccgatttgtataccaatgcaagcatgatataacctccttgtaattatataaaatataaaaatagcgattcatcttaaaacagtttctgacaagatacgaaagtagtgaaggggacgaaatcgattctggagaagcgaagtgttcgcctcaaagctttctgaaagaaagctgcttcggaagcatatgctatcaacggatttttcccttgggaaagggaaatcaagaaaatccgtggataacagcgatcataagaacgattcgtaaccgaaacgaccacttcgaacagttgcattgaaatgttttaattaacgctggcgagcactgaatccagccgctctacaatctcaaccagttcgtcttcggttgtggtaagggaaggccgaaccttaacaacgttgccaaatccatatcttgaacttcttaagataagatgttcatctgtaaaagcgcggtcaacaatggcattggttttgagcgtatccggttcattaccgtcacctacaatctccaacccccacattaacccgacaccacgagcttcaccgatacttgggtacttcattgccaattcttgcagcaattcacccaaaatttcacctttgcgtttcacggcatccagaaatccgggttcggataccacttccaaggtagatttggcagcggttacggagatcaaattgcttcctgaggtgaaggagtgttcgtgcttttcgagcacattcagccgggattgcattaataccgcagcaacaggtacgccgatcccgccaagaccttttgcaagggtgatcatatcaggctggatatcaaaaagttcgctagcgaacatggttccggtacgaccgatgcctgtctgtacttcgtcggcaataagaataatattgtactcatcacacagtttacgcagacgtttgaaatatccggcaggaggaatgatattgccgccattcccgagaatgggttcgatgatcatgcaggcgactgagccggaacttgcatattctatcgcatcagatatagcttcaacgcattgatagtcgcaatctccatttgaggatttgaatgggcagcgataacagtatggggcaggtacatggacagcgttagccacagccgaattggggaagcgtttccgcctaaaggcattccctgaaatcccggtggcaaattgggtctgcccatgatgggacagatacaggctgatgatgtctgttgattcggtatacttctgtgcaattttggttgcacattcgttggcagttgaaccagtgatatcccgcatccatccggcattaatgtcgtttggagcatattcgattaagtgatcaagtacttcatttacgtacggttcggtgaaggaggaagacatatgcgtcagattgccgacttgttcctgaattttgctgacaacatgtgggtgattatagcccagtgacagattgaacgtgcccgacacgccatccaggtattcaacacctgaatcgtcaatcaacttaatcccttttccggctatgaagcggttgttggttaaagtttgcatacgatttcctccaatatattggtgtactagctcgaacgaagctcaacaatccggatgatgcgggcatcacctcccttaagaaacgatgtttacatttccttgctatgttgtgcgagagcagcacgtactgcattattttttacagtccatagatgagagaccatcaatgtgagcagcaggatcagacagaatccggccaaaatccagatcgtattcacgacaggccctgtactcatactccatccagtcacatactgcaagatggcacctccaataccacccgatgcgatcaggatactggttgtccgctcggtcataccgggaatcagaacatttgcgtagaccagtgcgatacagaacagccctgacatgaacagaccggttccgaagatcagcacatacgttgtccactgtccagttacaaataccatagcgaccgtaaacaaaagcgtgccaaccgtactccagatcaggaaaggcatatagttgacggcttccgctattttcccggagaaaagacgaccgatgatcatcgcaatccacaggatggagacactcagcgatgcgacagattcctgaaggtgcaatcgttctacgagaatggagggcaggaagttcatcaatcccagttccaatcccatgtagatgaaaaagaagatgacgaagattgttagcagacccagatgttttctcgaatattgggctttacctgctgcatgtgccactgtattctcgccagcctgttccagatacagtgcggctggccggggcatagtgatccacagcagcatgagaactagtgacaacacggccactgtataaaaagtaagatgccacagatctatccagatgaataaagcagcgacagccgggatgagaagtgctccaagagcaaagaagacatccagcttggacatggcgaccgccttttgattctcagtgaattcgatcgtgaatgcacctacagagggttcgatgatacctgaaccgaaacctacgataatcgtgagaagaagaactacagaccaggatggcagaaaaccgagtactatataagcagctacaatacaaatcagagctagggtcagcatcgcttttcttccgatacgggctgtcagggcaggagctgcgatgacaccgacaagaaatccaagaaactgcagaaataacaaaaatccgccatcactgtaaccgcgctcataatgtgacaataaaacaggaagaagtgcaccgagcacaacgctggttatgccgattaacagataaaaaccgcagcttagagcgaatattcttttcaaaagcccgcctcctagttggatataaattttatattatgtaattaatgtttatttcatatataacttataccataattgtccaaatgtacatgctttttgttgtaaaataatgttaaattttgatgaaaagaaatatttctcgtgctaagttttttctaaaacgatttcgtgtcgaaaggatagatatgacaatccatatgacctttaacagggtttggcatctgtattgatcgaagatagtaacacgtacatatataaaaaacgttccctgtctgagtagacgggaaacgttctaattaatttttctatatgatgaacctggcttccacgtatcgttattaagcagtctgtacaaagaaaattccatcgaatggtgcgtgagcagacgcgggaccccttcgcaaaaataaataaccatttacatcgggaagacccaatatatcccgataaggctcaggaaaatctccggaatatatttgacacaccagttgatgttcttctagcaaatggtcaattcctttcacaccgtttggtaaagtgggagagaaaaatgaaaatgcagggaactcctgatcgtctaactccatctcaattaaacgtacgccgcttaaaggaatgggcggaacgggacatacggaagtgaggggatgcgaagataccgagacataagtgcatccggcaagaatattctcgttccattccagctcatctcccgtataggtgacctgatccagaaagtattcggaagcggagtaggtcgagaagaccgagatatatttatcttgtggtaaagaagggatatggacctgctgtgaaagtgtattgcaattgatggagaacagatgtaataaaggctgcccctcagggttgagcggccagtcggaaacgtatgcagtttctccaccaatccacatgccagagtcttggtttggatcatcggggtcaactgtaaatcgagtaactttgtacatgagaagctccttccagagtgtattttggctttcctatgtaacgttgtatgtgtatttatataaccattcattgcttcatttcagtataaatgagatgatgtggaatgaaaatcagtacaaggtactaactcattgcatgaagcgaagaacgtaccagctttcaaagaaccagtggcaatatttcagatgagaagtggtgacacatgttaattaacaaatacataagtgaaacgggattctgctcccgcagggaaacgaaccgattaattgcagccggacgcataacgatcaatggcagggtatgtgaaaaaggggcagaagttgaacctcatgatgtggtactcattgatggcaatcagattcctcgtaatgacagcgaacctgtctacattgctttgaacaaacccatcggtattgtctgcacagcagcagaacatgtgaaggggaacatcattcaatatatgaattatccttctcgcatatttgcgataggcaggctggataaggcatctgaagggttaatattgcttacgaatgacggaggcattgtgaacaagatgatgcgttcagagcataatcatgataaagaatatgtagtgactgtagacaaacccataactgacgaatttgtaaagtccatgtctgaaggcgttgaaattctggacgtggtgaccaagccctgcgaagtgtataggcaaagtgacaatgtatttcgtattattctgacacagggtctcaacctgcagatccgtagaatgtgcaaagccttggggttccgagtcctcaagctggagcgcgtgcgaattatgaatattacgctggatcaactggagcgggggcaatggcgtcatctgaagcaagaggaactggagattctgctgtctcaattaaatgagataaaatgaatgacttctgctcatgtcaacggtggtcaaccacgatgtccagttatatcagtaaaaaatgaagcaaacactaacccctatgcggattagtgtttttgttgttaagcttatgttcttttcgttctgaaatgtaagagccaaatagggttaagaacgcaccgagtacaatcacccaggttatctgctcttgaagaatcagtgcagatgacacaacagtaatgacaggcaccagatagatatatacgctcgtttggatagctccgagaagatttacggcccggttccaggtcacgaaacacaacgcggaggcacccagaccgaggtagagaatattggagagattggtcatgttcgtgaagcgtccgagttcccaatggaattcaaacaagaatagaactggtagcatgaagatcaggccatagaagaacactttgcgagtcgcgccaatggtgtgataacgaagctctccaatttttcgcattagcacagagtagatcgcccataccgcaggtgctatgaaagcaagcagatcaccaatcggattcagttgcagaatgaaactgccgttcagtgcgatgagtaggatgccgctcaaggcaatcccgaatccgataatgaagcggcgagttaacttctcaccatctaagaagaaatgtgcgagcacggcagtgaagaacggtgcaatggagacaataacacccacgttggaagctgttgtgtacaccagagcaatattttcaataagaaaatataacgtcaccccacatagtcctgctccgataaataaccattcttctctgaatgagacgatccgcagtgaacgtggatagatcaataacagtaccaaatatccgatcaggaaacggaaaaatagaatctccactggagtaaagtcaatcagcagaactttggtcgagacaaaggtagttccccagatcagtatagtaaacaaagcgagtaaatgtccggtagaggctctagtgttttgatgatcaagatgacttgtcatacgatgttagtggtggttcgtttcaactctgaatcatgattgaagatacgtctatattgcttgggtgtcaggccgatcagttttttgaaaaaattcgtgaaatggctctggtcactgaatcctgtctgtgcggctacttcaatcggaagcagaccttgttccagcagacgtttggcttgattaatgcgaatcgtttccaggtaacggtaaggtgatatccctttctggcgagtgaataaacgcagcaggtggtacttgctcatctccgtcaaatcggctaactcgttcagtgagatgctctccatgtaatgagcttctatgtaatcacatatgcgtctgatctccaaggtaacatcctgtgtggaaacaggtggttcagcatccgaataatctcgcagcaattgatccagtagtaagagtaacaattcttctttgcagaaatccgattgctcttccagaatcatctgatgcagctcgtgcagggaacccacaagttcactttgacagagaacgggggatgtgaaccgtggcaagtaagcttgtccagtaatctctctcacatactctcgcataacctcaggctggacgttgatacagcgataatcgagggttctgccatcgacctgttcgcaggcatgaggatcatgtggattaaaaacaatcatgtcaccactattcagaatgtattcttcgttgttgcagacgaggtgtcgtttgccttcctcaatgaatccaatgacataatagtcatgaaaatgattgggaaacttctgcataatgccttcaaattgataagcttctagctgtagatcggtatcaaatacgacagtccggacttcccgagtcatgatgcaccttctttctggtaagttaagatcattataggttgcaaagaaggaattttcttgaatgatattgctattgctcgaagtgtttggtcggacagatatctctaaaaacaaaatacccgcaatcccggagggaaagcgagccctttgctaagtatagttgattcatgagttcaaacctatatatagtggagaaaaaatctctggaacaataaggtattgttcttagtgtaacgtagcgagtacttcaggtgtaaaagggtgaatttcagatacgcggccttcctgtattttaactgcccatgctggatcaccaaggagtgcacgtcccacagctaccagatcaaattcctgttgttcatatcgcttcataagttcgcccatacctggatgtgttgttttatctgctccagcttcaggctcatctggcatacccacagaaccgactgtaatagtggtttgaccactcagttttcttacccaacctgcaaatccaagatcagatccctcgaactcgggctcccagaagcgtcgtgtcgagcagtggaagatatctacacctgcgtcaaccagcaaatgaaggaattgctccagttgttcgggggtgtcgaacagtctggcttgataatcattcatcttccattgggaaatccgcatcgcgatagggaaatcaggacctaccgcagcacgaactgccattacaacttcaaccgcgaattgagttcgtttctgtaggtcaccgccatagcggtctgttctcctattcgttgttttccagaaaaattgatcgatcagaaaaccgtgtgcaccgtgaagctcaattccgtcaaaaccaatgctttgtgcattggctgctgcatctgcataagcttgaatcatagttgcgatctctgcctccgtcatgggcgcacctacttgagtaccttccatatcaactcccgatggactaagagattcagcttccggatgtgggttagatcctgaaggacgaacgattcccatgtgtaaaatctgcggaaaaatcttgccgccggcttcatggacttgttcgaccacttcagcccacccttgaagagctgcttctccatacatatgagggattctaggctcacttgatgcagatggatgctcaatggtcgcaccttcggtaataatgagtccaacaccatgctcagcacgccgacgataatatgcggctacatcggggcccgggacaccatccggggagaaggcacgagccatgggggacatgacgatgcgtgaggacagggttaatttttgaacagtgtatggttgaaacagaagctccgtagaaataacgttatgttgttgattactcaaactaagcacctccattattatgcaccttcaagcgggtacgagtgcaatcttaacaaggtctataggcatgttcaaccaacaatcgaagcattttgttgcttaagcgaaagacacggattattgtatggtgtctttgcacttgctttcacttgttgaacaaataacacttatctataatgaaggagtctaaccaaatattttgtgtacaaaggaggattgggacatgtctggtgtattgtctccaaactcgaatgatccgcgtgtaatccgcacgcgtcaattaattcttgatgcgtttttaaaccaattgaatcttaaaaatttcaacagcattacaattcaaaacattacggaacaagccacaatcaacagggccacattttatgcccattttcaggataaatatgcacttcttgaagccttgttatcggatgcttttatggaatatgtaacgaaaagggtggaaccggatgcccggttatctgccgaaaccatacagcagcttatattttcattatgtgattatcacgtctcaagtaatggttgcatcaaaaaatatgagacagttgcaccaattattgaagaaaatatcaagacacagttggagcaattccttcttgaattaatgagcaaagtagcgggggatgtagatcccaaaacgctgaaaattacggcaaccatgctaagctggtcgatctatggcatgacatatcgatggaatattgaaggcgggcaggaatccccggctgaattagctaacagagtggtcccttatatgatgggtggattggaattgttgaattaactttatttaacgaaattgcattactattcgaatggacatgggaggaataacaagatgtttgaacatttggttgtttttaaatttaacgataaaaccacactagccaaacagcaggaatgggtggatcaattgctcgcgttacaggaacaaataccggggattgtcacgctgactgcgggaatcaatgtcacggaagaaacggaccgtatccaaggttacacgattggattgagagtgacgtttgaagatcaggaggcattgcgcgcctatggtccacatcctgctcatcaggcatttgtagcttccctcgatggttgggtagcagatgtcattgtagttgattatgcgatataaaggtgcgaaattagaggtttaatgaatataggagttgaggattcccatgtgtttaattttatttgcttacaacatgcatccaaagtatccgctaatattgggatcaaatagggatgaattctatcacagacctacggctcaagcacactattgggaagatcatcctcatatactggctggtcgggatttgtctaaaatgggaacctggatgggcgtaaccacagaggggcgtctggctgctgttacgaattatcgtgatccaaatgaagaggtacatgccaagggctcaagaggagatctggttgctgattttttaaagggaacgtccacaccggagcaatatatgcaacatgcggagcaaagccaaaatgattatcctggctacaatttgttagtgggtgatcctgacgacctctattattattctaatgtaggtaatgttgtgatgaagttggaaccgggaatatacgggattagtaatcatttgattaatacagattggcccaaggtgaaacgtggaaaagaagggctggagaaaatcatccatggggaggacgaagcaaccctgacagaacaaatgttaggtttgctgcaaatcgcagacccttcagtggatgagcttttaccccatacaggtgttccattggaatgggaacgtttgctttctcccatcttcgttagaagtgaaaaattcgactatgggaccagagcttcaaccgttgttctgatgaacagagaagaagtgtcttttacggagagggttcaccagaacggagaggtaatggagcaacgttttcacatcaaacctcttaactcgacaagctgagaatatgaaagaaatgatgttcagacattatgcatttacatgaatcactgaagttacatcccacgttcatgtttcattgcttctgagtgtaaaagaattatttaaattttccgtgtcaactaatataacacaaaataaacggtttgagagtaccttttgtataacacgcccaattttagttgggctctttatctcttatcacaattctatgttatgaatcatggaacttccctgaatagtttatataatgtgaatcaacataacatgatttgcagcggttctgttgattctaatttcaggggggcaacgtgggatgaaagaaaccaaaaagatgagagttttttcattgggaattcagcacgtactcgcgatgtatgcgggagcaattctggtgcctttgcttgtgggcagagcactaaatctgactgcagagcagttggcatatctggtatccattgacctgttaacgtgtgggattgcaacatggcttcaggctcggaaagggaagtacttgggtattgggttgccagcggtgctcggaagttcttttgtagcggtgacacccatgattgcgattggatcgcaatacggaattcctgccatatatgggtcgatcatcgcagccgggttatttatcgtcatctttgccgtattttttagcaaaatcgtcaaattgtttccgccagttgtgatcggtacagtggtaaccattatcggtcttgcgctaatcccaaccggcattaaaaacatggcgggtggagcaaacagcgagaatttcggaagtttggacaatttggcgctttcatttggtgtattactgtttattctaatcctgaatcgatatgctcgcggttttgtaaaatccctggctgttctccttggtattattgtgggaaccctcatcgcagccatcatgggaaaagtgaattttgcctctgtacaggaagcctcctggttccatttacctcaacccttttactttggatggcctaccttcgaaatcggccccattattacaatgattattgtaggtacggtggttatcatcgaatcaacaggtgtatttatggctttgagcaaaatctgtgatcaaccgatcaacgaaaaagatctggcacggggatatcgcgcagaaggtcttgcgtttgtcctgggcggcatttttaatgcttttccatacaatacatttgcacagaatgttggtttggttcagctctccaaagtgaaaacgaccaatgttgttgttgcagccggaggtatactggtctttctggggctcattccgaaggtagctgcttttgcaaccattattccaagtgctgtcctcggaggagcaactgttgtcctgtttggaatggtcgtctcatccgggatcaaaatgctgcaaaacgtcgactttggcaaacaatccaatctattgatcgtggcttgctccgtttcacttgggctcggtgttactgctgtacccgatctgtttgcccagcttcctcaaagtattcggattattgttagcgatggtattatcacaggaagcctgtcagccatcctgcttaatgtcttctttaacctcgctttgaaaaaagagagcttgccaatacagcctgtacaggctcaagaagcacatacgtaatccttgtaataacagacgtgtcatctaggagtaagtaagcggaatggatccaagatggttttctgggaagtggaatgcaagacaatgattccacttggcaaagaaacctcttggattttttggtgcttacgattcatgaggaatgcaaaaggcatgcaaatatgctaaagtttcatcaagaacattttaatatgttcgtttaagtcaacaacctcttgaattgaatttccatgcgactacataaatgagcattggttcacaaggctacaatataaccaagggatatccgtggtgcagaaaaggagttgtgatcaccatgcaacaagaaacgttgaacaaagggtggaacttggagaatagttatgcgaagttaccgcaacccttttttacaagtcaggtcgcggtgcctgttgaatcaccaaagctgatcatttttaatagactgcttgcatccaccttgggtctggatgtggagtctcttgacagtgatgaaggagcgcaaatttttgcaggtaatatgattccggaaggagccgagcctttggctcaggcatatgcaggacatcaatttggcaattttaacatgcttggtgatggacgtgctttgctgctgggtgaacagattacgccacagggcgagcgagtggatatccagctgaaaggttcagggagaacaccgtactctcgtggaggagatggacgtgctgctgtagggcccatgttgcgagagtatattattagtgaagcgatgtatgcactgggtatcccaacgacacgcagtctggctgtggtgtctacaggagaaaacattatccgcgaaacagagcggccaggtgccattttaacgcgtgtggcttccagtcatatccgggtagcaacctttcagtacgcagcaagatgggggtctattgaagatcttcgggcattggctgattatacgttgcatcgacattttcctgaggttgctcaagctgagaatcgctatcttctgctccttcaggaagtgattaagcggcaggcggctctcattgcccagtggcagcgtgttggtttcattcatggcgtgatgaacacagataacatggcaatcagtggtgagaccatcgattatggtccgtgcgcctttatggatgcttacaatccttcaaccgtgttcagctccattgacaggcaaggtcgctatgcttatggtaatcaaccgtatattgccgggtggaatttggctcgctttgccgagacgcttctgccgttgttgcatgaagatgaagaacaggccgtgcagctcgctcaggatgctattgcacaattttctgaattgtaccatcatcattggctccagggaatgcgtgccaaactgggcttgttggatgaagaggccgaagatgaagcgttgatcaaggagcttcttgaactcatggagaaacatagtgcagattacaccaatacgttcctggcattgacctttgataggttggaagggacagctttgtttggcacgccggaatttgctgaatggaatgagcggtggcaagcaagattggacacacagcaagaggagaaggaagtctctcggcagttgatgagaacgaacaatccagcagttatcccccgcaatcatcgggtcgaggaagcccttgagcgagcggagaaccacggagatcttagcgtgatgcagaagcttttggcagttctttcagacccgtttgcgcactcacctgagcaggctgaatatgccgaactaccagcacagtgcaatacttcgtatcagactttttgtggaacctgattgaacagtaggaacgaatatgaagaggctgccttgggcagctttttcattttttcattctgtcatcgaagttacttttatagaggcaggtgcattcatgtccaatatgttaagcaaacaacaattggcagacatccttatacagcttttagagctcacatctttccctagggaacagatgcagaactatgttaaccgcttgtttgagacctttaaatgggatggggtgccctatgtagagactggagaagatgcgtatatcgttcgaatatacgaacgtggtctcgtctcattggagaaacgggtgaaacagccggatgaagtcatatattggttgctggaagatattattttcaccgcgacgcatgtaggattgttggaaagacatggcgtggataataaagagacgcatttgaactatacaaatgaagtgatgaaggacctgaacaggggtgtcctggaagccttccagcagatcggtaatccttatttacattggcatcagacgggtaaacgtcaggagttagagggcatggcataaagaaaaatgaggtgtgttacatgagcgagcaagatattaatgacgtatggtatgactatgctgtgttatttgtcgaaaaaaagaatgaatctgaacagggctgggcatcgttgacttcgaacgagcaggacattgcagctttatggttattagaggcggatgtctttaatggcggttttatacagtttttctgtaactggggggaagaggtataccgttacacgttgcgggcattacatatcattgatgcgactcaagtcgtggagattataacgtcggcatacggctgcattgagcacttgaaagaggatgaaaggcttaccgaactgtgggatattcctaaattcctgacaaaggaacaagagcagcatttagatgcgctggatcagcagttttggaacaatgaggatcagatcgcggagaaagcctatggttattatcacggaaaattgaacatgatgatcatataatctggtttcaactatgcaaccgttgttctgttcgaagattaatacttggtcttgcaatgactgaaacgttcggctatacttgctataaattgaatacatgaatcacgttgatagagcgcagtagcggctttgtccctgttacagaaagtcaggggttgatggaacctgatacatacaagggctgcgaattacactctggagtacttgggtaatgccaagcggatgggcaaacgatatattgccaaaagtggtatggataacgtgttaaggtcatgtgttgtccatgcaatttgggtggtaccacggttataataatcgtccctgtgtctaatgaagacaaggaggcgatttttttgtgtccaaaaaagccgttccagcgtgtaatttcgtaatttaacgtagatcatgactgaatcttgaggatagaaaaggggttatacacatgaatattattgatgaactacagtggcgtgacgccattaaccagcagacagatgcagagggactgcgtgagttgactgaaaccaaatcgatctcgttgtactgcggcgttgaccctacgggggacagcatgcatatcggacatctaattccattcatgatgctgaaacgttttcaactggcaggacatcgtccagtcattctgataggtggagctacaggtacgattggtgatccaagtggccggcaggcagaacgttctttgcaaacgatggagcaagtgcaggagaatgtggatgcactgacagcgcagatgaagaagttgttcgtaacagacggtgataatcaggttcgcatggtgaacaactacgattggacacacaaaatcaatgtgattgaattcttgcgtgactacggcaaaaactttaacctcaacacaatgctggctaaggatgtagttgcgagcagactggaaggcggaatctcgtttaccgagttttcataccagatccttcaatcactcgactacctgcacctgttccaaaacgaagatgtacagcttcaaatcggcggttcggatcaatgggggaatatcacgagtggtcttgatctgattcgtaaaaaagaaggatctgaagcgaaggcgtatggtctgaccattccgctcatgctcaaatccgacggtacgaaattcggtaaaacagctggcggcgcaatctggcttgacccgaacaaaacaacaccatttgagttctaccagttctgggcgaatacagatgaccgtgatgtgatcaaatacttgaaatactttaccttcctgagcaaagaagaaattgaagctttggctgaaaaggtagagacagagccgcacagacgtgaagcacagaaagcactcgcggaagaaatgacaaaattcgttcacggcgaagaaatgctagaacaggctaaacgtattacagcggcgctgttcagtggtgatatccgttccctgacagcagatgaaatcgagcagggtttcaaggaaatgccaacattcgaaacggacggggaagcgaaaaatatcgtcgactggctcgtagatctggggttggagccatccaaacgccaggcgcgtgaggatgtcactaaaggcgctatctccatgaacggtgagaaaatcacggagcttgaattcacagtgtcggcagagcatgccattggcggtaaattcatcattatccgtaaaggtaagaagaactacagcctggttaaactacaatcgtagtttccaagaattagaacgtaacacagagacgtatagagactataatagagactataatagacacacaaataaagctacaaatacagaaacaaaaagaccgccttccatctctgtcaggacagaggggaggcggtctttcgtatatcaggccagtgagtgacctatcttattgattaacgatcgctgtgatttcttcatccagatcaagtcgtacattctcacggtacgcccggatgttgtattcactgtgcaggtagcgaagaatcgcttcaatcatattggactcgaccagatattgactgcgtccttggatccaaacttcagcggaataacctgtatcttcttcccagctcagttctacattcacatcggttggacgtacacccttacgttctgccatatgaatacagattgcattcacaatttcatccatgctcagaaccatagagattagtaccgtccgtttctgttacggtcatcatcacgatcattgcgacggtcataacgaccatccgctgcaggtttgcgacgattggagatggctctgaagagtgccatagccagcataacaatcaacataattgctgcaacgttcacgagcaatccaaggatgttacccagagcgcccatgccaccgaacaatccgccaaacatcataccagcaagaccaccaagcatcatgcctttcatgaatccgccgccaccgccgaagaatccgccacggttcgttgtagctgctccattgctggaattgttattcgtattcgatttgcttacattgctgtcggatttcttaggtgtattgctataacttttcgtaccggatttgaatccgccaccacgtcttgcatctgcagaatccggattcgttactcccactgttgcgaacaataatgtaaaggccataaataccatcattagatgtttaactccgaattttttcttcattgtaaagatcgtaaccccccgattaatttgtttgaatcgcccaaaaatgggccttactcatgtaatacggtcaacttgcaggaacgtttcaaattttattaaatttctgaaacgcttggacttgggtcttgaattgctgcttggccatcaagcaattgggtaacccaatgacaccattccaggcctgtttgtgcgtgcattaaccctttttgtaccaggatgtagcttccaaaatctcggttgcctacacgaagattatcctgaggtatacgtgacttcagatcctcgaaataacgtatgcgttccataaaccagcttttacgctcgttaagaatgcgtctcatgcttccgtcttccgctatgccaacacacaaaatacgcaaattaaattcatcgcgtgtaaccggtgcggtaacaggagtaatcatccattccaagagcttttcaatgcctttttccgtaactgcgtacattttcttgtccggtttgtcagactgttgtacccagcgggaggccaataactcatcgttttccatcttggacaggagtggatagatctggctgtgtttcgcctgccaatgaggctggattttcagcatcagatcatagcccgatgactcctcgcgggtaagcagcccgagtaatccgtaggaaagtatgttcatgcacatgtctccttaatattagggctaggtcagagagaacaatcgtttttactttctttgaccgctttcataaaaagtgtacactgaaactgtatggtttgacaacctgacagaacaactgccttaatttagacaaaaaaagtgcgaaccataaggtccgcactccaaaccatttagagagatgcctgttgtccatacccctcagcgacaagatcaagctcacctgtggcagaatcgataaccatgccgtggacgggtacattgggaggaagtaaaggatgcttcttgatcacttccacagtatgttttaccccttcttcgacgctgtcaaacccgcgcaaccatttttgcaaacggatgccagagttctccagagtagtcatgacttcttccgatacgccacgctcaaccatatgtccaatcatggtctcagcgtgaagggaagccataccacattccgtatgccccactaccaggacttcatctgcccccagttcatagatggcgacaagtacactacgcattacgcttccgaaaggctgagagataatcgcgcctgcgtttttgatgattttcacatcaccatttttcaggttcatggccttgggcagcaattccaccagacgtgtatccatacaagtgatgataaccatctttctggttggaaacttgccagccgtatacttttcgtattctttggtctcgacaaatgatttgttgtaagtcaaaatctcttgaatgttgttcatgtccattgcctcctgttatccaatacgacgagcacggccacttgcatatgatgcagcttgtcctacacgcctttgctttaatagtatttcacggtcagcagatggcattactccaaccctttagaggttgttcaaaaagtccacttttgattacaaatcatgcttgagggcatcatcagtatcgaagttgaacgccatttctatcttcgcggtaatgaaaaccagactttttgaacacgtatctttaggagaacaatgcaatttcatctgttaaaagttgattatacgcaatgcaaaaagtatcatcaatagggtataacattttttttgaagaggtgaacgataacaatggataaacaaacacaggaacatttggaatccttccgtaatctggctcgtaaaattaagagctatcatgaagccattggtttgcttcactgggatctgcgcacaggtgcgccgaaaaaaggcgttccgactcgttcggagacgctgggtatgttgtccaccgaagcattcaagctgcaaacctcggctgacatgaagacttacctggatgcattaacgactccagcagtattggaacagctcgaagatatagatcgtcgtctggttgaagattgcaagaaagaatatgatcgcagtcaatccgtaccacctgagaaagtacaagcttataccgtgctaacagccaagtcggaaacggcatgggaagatgccaagcataatagtgattttgcaggattctcaccttatctcacagatatcgttaagctcaaacaggagtttattgattattggggtgtgaaggatacacgttatgatacgctgcttgatatgtatgaaccggatctgacggttgagaaagtggacgctgtgttcgcccgcctcaaagcacgtttggtgcctttgcaagagaagattaatgcttcagaaaacaagccaaatacagagttcctgaatcagttgtttgacaccaaacagcaggaaaaattcagtctgttcatcctggaacaaatgggctatgactttgaagctggacgattggacgagagtgttcatccttttgcaacgggtcttaacccgggtgatgtgcggatcacaacacattatctgcaagatgatgtagcaagcgcagtcttcagttcactgcatgagggcggacatgccctgtacgagcaaaatattgatgacagtctggcgggtacccttcttgccgaaggaacgtccatggggattcatgagtcccagtcccgtctttgggaaaacatgattggtcgcagcctgccattctggacacgttattacaaagatttgcagcagcatttcccgcaactgagcgaggttgaactggaagatttctatcgtgcaatcaaccgggtagagagttcactcattcggattgaagcggatgaactgacctataacctgcatattattatccgatatgagatcgagaaaatgttattcaacgatggtctggaagtgaaagacctgccagagacctggaatgcaaaatacaaggaatacctcggtattatgccaacgaatgatggagacggtgttcttcaggatgttcactggtctggtggtgactttggttactttgcttcgtattctctgggtaatatgtatgcagctcaaattctacatacattgcgcaaggaaatgccggagtttgataccctcattgccgaaggtaatctgattccaattaaggaatggcttacagacaagatctaccagtatggtagaagtcgcacaccttccgaattgattgttgccgtaacgggtgaagaattgaacccggattatctggctgattatctggaagccaaatatgccgagatttacaagctgtaggtatccccgtatataacatactgaataacatttcgaagagctgaagagtcgggcaacattgcccggctcttttttgcatttaagttcttaaccttttgttgggcatcggcatatccataatagagagaaactgctgaaaccagtgaaggagggaaacaacatgaaatacacgccatggttcgtccggggcatcgttattctgctgattatcattgtggcgctcaccagctgtaataaggaagagaatgaagccaagattacgattggcgaagtgactcgttcggtattttacgcaccggagtatgtggctgtggctcaaggtttttttgaagagcagggacttgaggtggatattcaaacgactgctggtggtgacaaaacgatggcggcattactcgcaggttcggtggatatcgcactggtaggggcggagacgtccatatatgtctatcagcagggagcggaagatccggtcattaactttgcccagctcacccagacggatggtacatttctgttcgctcgtaacacagaaggtagcttcgattgggagcaactgagggattccacatttctcggtcaacgcaaaggcggcatgccgcaaatggcaggggagttcgcactgaacaaacatggcattgatccgcaaagtgatctggagctgattcaaaatgtggactttgccaacattgcgtctgctttcgcctcaggcacgggagattatgttcaactgtttgaaccccaggcatccatctttgaacaagaaggtcggggtaaggttgttgcatcgtttggcacagaaggtggtcttctgccttacaccgtcttcatgacgaaacagagttatcttaacgacaataaggatattgtacagaagtttacgaatggtctacacaaagcgcaggcatgggtagattcccatacggctgaagagattgccgaagttatttctccttttttcaaagacatcgatccagccattttggtaagcagtgtgaaccgttataaggaacagggcagctatgcaacggatccgatcattgatgaggaagagtggaacaatctgcttgatgtcatgagtgccgccggagagttgaaagaacgtgtggatttgaatgccattgtggataatgcctatgcggaagaggttacgaaatcaaagtaatggggtattcaggaaaggaagtgagcagaatgcctgaatccgaaagtgtgatccgactggaggggatctctcaagtatacgtcagcgagcgggaagcttccttggtgattgaagacttgagtctggagatccaaaaaggagagttcgtcagtctggttggaccgagtggatgcggtaaaacgacattgttgtcgatcatcgccgggctgctcacacccacccgaggagaggttaaggttaaaggcaaactcgttggcggcccctcagcacagattggttatatgcttcaacaggactatctgtttccatggcggaccattctggataatgcattgattggtcttgaactgacaggcagactggatgaacggagccgtgagcgtgtacgggaactgctggtaagtatggggttggccggaacggagaatcagtacccttcagagctttcaggaggcatgagacagcgagtagccctggtgcgcacgctagcaaccgacccggggattttattgttggatgaaccattctcagcacttgattatcaaaccaagctgcaattggaggatctggtttcggacacgttaaaacagtttggcaaaacatccgtcctcgtcacccatgatttgtctgaagccattgcggtcagtgaccgcgtcattgtactggatcgcaatcctgggcgcatccgtcgtgaatttatcattcccgatggaattcgtaaatctcagccgtttcatgccagggagcaagaaggattcaatgcgttgtttcaggcgttgtggagtgaactggatcagtccgggggaggtgaggaagacgcgtgaatccaatgaatccgaagcaggaaaagcgtgacgaatggatggggcagctgcatcggaatcatattcagcaggtggccagatggcgacaccaagtgcttgctgtacagttatctatgctagtatgtatgtttttgctatgggaagtggcaggcagacttcgctggattgatgtactgttattcagttatccgagtaaggtttttgcccagattggcaaggacatcgctagtggcgagttgtgggcacatgttggggtaaccgtaggggaaacagcagttggttttttactgggaacactggtgggaaccttacttgcggttttaatttggtggtctccttttttgtcaaaagtgttggacccctatatggttgtgttcaacagtatgccaaaggtagcacttggcccgatctttattgtgatgttcggcgcgggttttacagcgattgttatgaccacattgtccatcacggtcattatcacaacactagtggtgtataacagcttcaatgaagtcgatcccaattatattaaagtcattcgtacgtttggtggagaacgttccgagatttttacaaaagttgtattacctgcttcttttccggcgattgtatccactttgaaagtgaacgtgggcatggcttgggtgggtgtaattgtgggtgagtttctggtcgccaaacaagggctaggttatctaattatctacggatttcaggtattcaacttcacactcgtattatcgagtctgttaattattgccgcagttgcaacagccatgtaccaacttgttgtctatgcagaacgcaaaatgctggctggccgcaggtgattctgaagtgttttactcgtaatgtgaccgggtatgatatgtatacaatttcacaaggggtgtcacgttgcccgataccgtaaaatcaagtaccatatttagtatgattattccgcgcagatccggaatgaatgcgatgattggagaagagggccttgaggttctgtcgcaacgatctaacttgccagcgtccctcattcggggcgtgttgctgtgaccggcatgcatgcgcatgtcggttgatgtcgtctagtttacttttggatgagacatactagtcatgataaatgaatgaggcgacgagctggctaagaatttttttgcagcttagaggagatggaatgttaaatgggttttagggtaattaaaactgcaatcgccgcattaatggctgtattgattgcagactggtgtcgcttgccgggaccaacatcagcgggattgcttgccattcttggcgtggatgtaacgagaaaacgaagtattcgcaccatatcagcgcggttctttgcttccgtagttggacttttatttgcaagtgtactttttcactttctaggcttccattattgggtgctggcagtatacatattgatcgcattcccggctattgtccgggtaggcttcaaagaaggtattgttacaggttctgttgtggtgtttcgggtgttcggcggcggggagatggacgtgcatgtcgtcctcgtacaaattgctttgctgttaattggtcttggttccgcaatggcggttaacctggcctatatgccggcagcagatccacagatgctgcgcattcgcaaacgaatcgatgaactcttctcgaagatttttaaggaatttgcagccacgctgcgtaatcccaatgaagcatgggcggggagagagctgattgaagcagataaagcgattctgggcggtattgatgctgccaagcgttctctggagaatcaggtaattcatccgaatgaggaatggagtgtctacttctatatgcgcaaaacgcagctggattccatccagcacatgatgcatctggtgtcccagatctatcagaagatgccacatgcggagatggtatcggagctgttcgatcagcttagtcaggacgtactcactgaatcctacacgggacgaactgaaaaacttcttgcagatgtgcaagaagaattcaaacgtatggagctgccggatacaagggaagaattcgagattcgttctgcaattctccagctgtgccgcgaactcgcgctgtatctgaaagtcgcgaagaaggacaaagcaccgtccccaatctcggaccggtcccaatctacaaacgaataatagaaaatagttgtcaccctagacgaatgccctgcatacacttgtagtgaatgattgtatggaggaggtttaaagatgtcattgagtcataaacatcaatgtagagagattatcacgaaggcgatctgcggcaaaggtcgtaagttctctaccgtaacacataccgtgactccgccaaatggtccgacaagtattttgggggcttggattatcaaccaccaatatgaagccgtatcagcgggtgacggaattgaagttattggtacttacgatatcaacatttggtattcctacgacaagaactctcagacggatgtagccaaagaaacggtctcgtatgtagaacatgtgcctttgtcctatctggacccgaaacaccggacttccacagtggaggtatctgcggatgcaacgcaggaacctagctgtgtggaagccacagtatcagcaggtggaagcagtgtaattatccgggtagaacgggaattcgctgtggaactcgttgccgaaaccaaagtttgtgtgaaggtctgcacagatggttgcggtgactacgaagacaaggactatgactttggcagtgccgatggagattatgacgatctcgatcccgatctgctcgacgatgagctgtgagtttgacgcctgtatttgataacctaaggtatcatatgcgccagaaggcgcggtgaagagggcgtaagccctctttcttcttaaatattaaaaaatgggtggtaacgagcctcgcaatgtgcctggaatacctttcacgggaaggctccgcattgcggggttatttttattttagttgcatgatccgggaggggggacgtaatgaatgtgatggaacaagcggaggaagcgttgcgccgatatgaaaggatgacttctggagaacgtgcagaacggttgaaacaggcaggcattgaagtattgtcactgcacgatcggcgcaaacgtgaaccaggcttgcgtgtacgctatgacgtagagataagctgtctgcaggcgatccggatcaaacgcaaggatactagtggcatgggaggggcacaggaaactctgttggagcgtgaagcgagttcaaccttgttcaagcgcatagaacgacttgcgatcaaaacgctgtatacgctagggctggatcatggagctgttcgaatggaatcctcagggaatggcggctgtgcagtgatttcgatcgacccgtgtccctggaaaggggtgaccaaccttgctgctacctatagggaaagctggaagcagcatcaggaactgctggatgaggaactgagtcacagacccattccaatactcggcatggacccggagtttcttctggtgcagatgccggaatccaaaatcgtacccgcctccagatttcttgaacgtacaggaatggcaggctgtgattccgtgacgattggtggacggcgcatatatccggttgccgaattgcggcctgctcccagctccgaaccacgagaactgctggctcatctgatgagggcattcgcagctgcttcccgcagcattagtgatcactcgctcatctggcaggcaggagggatgccacaacgggggttacctttgggtggtcatattcattttagcggggtgaatcttaccggggaactgcttcgtgcactggacaattatctggcattgccactggcatttctgcaagacccccgtggatcgggaagacgaccccgttatggagcacttggtgattttcgtctgaaatcctatggtgggtttgagtatcgtacgttacccagctttcttgtgtcgccccttgttgcgaaaggtgttgtggccttggcaggtctgatcgcgagcgggtatactcaattacggcagcgtccgttggcgaaagctgaggttcatacggctttttatgaaggaaagcgcgaagtgattaaggatcacatcccagcactcgtagatgatctgaagaggttggatggatatgcacgttatgaacggtatgcgtctccgttaatccttcaattaaaactgggaagaacttgggatgagagccgcgatattcgcaaactctggaatattcgggcaggttcatgaagtacggacgtttttttgatataataataaacaagtcttttatgagtaataagctactacggaagatatggagcagcaacctttgaaggaagtggcgattagccaacacataaggcggaggcgcaaacacagtgcctgaccgtcttattgtccttccaggacgcgtttcttcctgacattataggaacgggatggaggatattcatcatggctcagtatacgccaatgattcaacaatatttgcaagtgaaggccgaagcacaagatgcttttctattttttagactgggtgacttctatgaattgttcttcgaggatgcgattaatgcttcccgtgaacttgagatcacgctgaccgcacgcaacggaggcacggatgacaaaattccgatgtgcggtgtaccttatcattcggctgacaattacatacagcgtctgattgaaaaaggatataaagttgcaatttgtgagcagatggaagatgcaagtgtaaccaaaggcatggtacgacgcgaaattgtacgtgtggttacacccggaacggtgatggaaggaaagacgctgggtgacaagtccaacaactacatggtgtgtcttacaggtaatcaaaatacgctggcgctcgcggcctgtgatctgtcaacgggtgagttgtatgtgacatccgtaccctattccaaggaatggctcaaggatgaaatcggcatctacgaaccatcggagctggtgggggatgcagcgctacttgaaacggtagaagccgaggcgtctccaatcggtcgccctgtggtctacacgtcgtggacaaaaaataaggaagatctggtccgtcagcagtttggcgaggctgtctgggcaagattagagcctgaacgtcaagcgtgcattgcacgtcttttctcctatctgagtgagacacagaaacgttctctggggcagttaactcaaatctcaacgtatgagcccgatcattacatgatcttggacccgtttacccgccggaacctggaattggtggaaactgtgcgtgaacgctccaaaaaaggttcattactctggttgcttgatcggaccgagacgtccatgggtgcaagaatgctgcgtcgctgggtcgataagccattgttgcaaaaagggaagattaatgagcgtcttgaagcagtggatacgttgtacaaccagtttatattgcgtgaggacctgcgggcagaactcaaagacatctatgatctggagcgtttggtaggccggattgcgtttggtaatgccaatggtcgtgacctgaatgcgctcaagtcatcgctggagaaaattccaggacttcgtcagcattgcgcaggatcttcttccgcaacattgcagcatattgccgaaacgatggatgattgcaatgatctgcgtgaagctatcgggcaagccattgtggacgagccgccggtatcggtaagggacggaggtctgattcgtgaagggtatcatgaacgtctggatgaattgcgtgaggcttcggttaacgggaagcagtggattgcggagctggaagcgcgagagcgtgaggcgacaggcattcgatcgctgaagattggatataacaaagtgtttggttattatatcgagatcaccaagtccaatctgtccgcgttgccagagggacgttatgaacgtaaacagacacttgccaatgcagaacgttacattacgccggagttgaaggaaaaagagacgctgattctcgaagctcaggacaaaatggttgatattgagtatgggctgttcgcagagctgcgcgagcggctgaacaaagagattgcaagattgcagaagctggccgaacaggttgcagagattgatgtatatcaatcttttgcggtgattagcgctgagcgtaactttgtacggcctacgctgaccgacggttatgacctggttttggaagaaggacgccatccggtcgtcgaggcggtcatgcgagatggcgcatttattgccaatcacacggcaatgaccaaggaagaggcacgtattctgctgattaccggaccaaatatggctggtaagagtacgtatatgcgacaggttgctttaatctccattttggcgcaagtgggttgttttgtacctgccggtcaggcagaggtgccgatcatggatcgcattttcacacggattggtgccgcggatgatctcattggcggacaaagcacattcatggtggagatggccgacattcaggtcatgacggacaaagccacaccacgcagtctgattattatcgatgaattgggacggggaacgtcaaccagcgaaggtatggctatcgcacagtctgttattgaatatgtacatgatatcatcggctgtaaagctcttgtatcaactcatttccatgaacttgctcatctggaggagagtctggacaagctggccaactactcgatggcggtacaggagagtggagacaaagttaatttcctgcgcaaattgattgccggggcagccagcagcagttatggtatctattgtgcacgccttgcaggtctgcctgatagcattattgagcgggcgaatggactattgcatgggttcgaacatgcggccgcgcaagtagctgtgggcagtgaatatatcggaaacgagaagcaggaagaaggcttgaaattaaaaggtggagaattccagcacacggattcagcaccattgatccgggaacacgagattgtggagagtgcagagtacacaccttctattgaagattcggttgggaagcaacatgccaagaaatcaaacagcaaagaacagtccagcgcaaaccattcggatgtggttcaactgtccatctttggggatgatgagccgagtgtggcaacgaaaccggatgtagttgcggtgaataaaccagcgcgagaattcatccgtacgatgaaagatatcgatgtcatgaatatgacgccacttcaggcgatgcagatattgaatgatctcaaattgaaggcacagcaattatcctgagtataagggaggggaaaacctgtggcgaagatacatgtgcttgatgaacatattgccaaccagatcgcggcgggtgaagtggtcgaacggcctgcttcagttgtcaaagagttgctcgaaaactcggtggatgcaggcgccaccaagattgaagtgacggtggaagagggcggactcctcagtattcgtgtcaaagacaatggtacaggtattgagccagaggacatggaaaccgccttttatcgtcatgcgaccagcaaaatagcccatggccgagatctgtttcagatcacaagtcttggattccgtggcgaagccttggcgagtattgccgccgtgtccaaggtagaggtattgtcggcaagtgacaatgatgggcgggggcgccgcatcgtaattgaaggcgggaaccttcgcactcatgaagacgcaacctcaccccaaggtacagattttgcagtgagagaactattttacaatacacctgccagactcaaatatatgaaaacgatccagacggaactgggacatatatcagatgtcctataccggatggcgatgtctcatccaaacatttcgttccgactgcgccataatgagaatgtgttgcttcagacgttgggcaacggcgatctgctacaagtggttgcagcgatctatgggacaagtgcagcgaaagcgatgcttcccatccagggtgaaagtctggattaccgggtgagcgggctgatcagcctgccagaatggacacgagcgaatcgtaatggtatgtcaacgattgttaatgggagatttgttcgcaattacggtctcaatcaggcgattctcaaagcctaccataccttgctgccgatcaatcgcttcccacttgtcgtggtgcagttggagatgcacccctctcttgtggatgtgaacgtacatccggcgaagttggaggttcgctttagcaaggaaccagaactgtatgaattcatagagacgacgttgcgggggatactccggcaggaggtactgattccacaggtcaaaaaacagcagattcgacgtggagacgatagttcctttattcaggaacaattcctctttccacgtggtccgctgaaagatgcatctgatgcagaaggatatgggcaacaaggtccactcgggaaacctactgttgcaccgctgaagttaactgcggaagatgatgatctggatttggatgctccggcggatgtgtctacagcacagttggtatctgaacagggtcactcagtgccgttgcccgaagctccacctgaggttacacagcccccggagcaggtagaaagttggaacggggatattttgcagaagattgctagttatgacggggggcagacatccgctaacgtgcaagacggcactaaggatgtaagtacaagttcaagtacaagttcaaccgaaactgttcccaaatctgacctctcttctcaagatggtggggatcgtggagcaacagagaaaccgctggctgaaggcaaaccagctacgtatcgctccgattccgtatattcaccggttagggaagcacgttcatcgtataatccgtcttcagttccgagaagtgaacggacgtggaaaacttcaggtctacctgatgccactaaacttgctgctgccattaaatcggatgcatccatgcctgaatttccggagctgagtctgatcggacagcatcatggtacgtatttgatcgcgcaaaatgaccaaggtttatatttgattgatcagcatgccgctcatgaacgcgtaaattatgagtactattacgagaagtttggtaaccctgcccaggcctcacaagagttactgctgcctattacgctggagtttacaccttcggagacggaaaagctgaaaacaaggctggcttggttcgaacaggcgggtgtatatttggagcatttcggtggacagacgttccgtgtgcgctcccatccgttctggttccccaaaggggacgagaaagacattatcgaagaaatgtccgagtgggtgttgagtgaacgcagcatagatgtcgccaagatgcgagaagctgcatcgatcatgtgctcctgcaaggcgtccatcaaagcgaaccaaaagctgacggatcaggaagcagaagtgctaattcagcgattgggttcatgtcgtcagccctacacttgtccacatgggcggccgattgtgatttcattttcaacatatgatctggaaaaattgttcaaacgtgttatgtagctatttaggaggaatctatgtatattacaaccggtgaaaaggaagcggctttacttgtggagcgggcccaaaaccttgctgaaacaacagggggtacttacgtgcgccgtaataaaatgtctctgcccatgatgattgaacactatgaggcggaggaggttctggttgtactacagggtaaagtgcgtctatttcggaaggattcaccgttgctggagttccaccccagcatgggatttgttcgtgccaaacgtatattgcgaggagaacctgatccactgctggaggcgggggcggtgaatgaaggggataccatcatcgattgtacagccggactgggcacggatgcactggtgttctcggttgcagtgggtaaaagtggacgggtgattgcatgtgagagctctcttccgctatatacactattagtggaggggatgtctcaatatgagacgatcaagccagcggtaaatgaagctttccggcgtattgagctgcatcatgcgaatcatctcgatttgcttcgatcgttgccagatcaaagctgtgacaccgtatattttgaccccatgttccgtgaaccgatgatggattcaagtgctatacagcccttgcgagattatgcaaatgctcacgcgctggaggaacagagcattatggaagcaaaacgagttgcccgtaaacgggtagtcatgaaagaaaagcgcggcagcgcggagtttgacaggctcggatttgaaatacttgatcgggcgaatgcaaaaaccctgtacggagtgattaatgttgaacgtggaagttaaaccaaaacccaaactgcttgtgttggttggaccaacagcagtaggcaaaacaagaatgagcatcgagcttgcccaagctttcaattgtgaaattatctcaggggattcaatgcaggtatatcgtgaaatggatatcggaacagccaagattacctctgaagaaatgaagggtgtacctcatcatctcattgatattcatgaaccggagtacccgtattctgtggccgagtttcaggagagttgcacccgattgattagtgaaatccatgaacgtggtaaaatgccttttattgtaggtggcaccggtctgtatgtggaatcggtatgttacggcttccaattttccgatagtggttcggatgaagcatttagggagcaacaattcagctatgcggagcaacatggcgcacaggcccttcatgatcgattgagggaagttgatcccgttagtgcggatcgtctgcatccgaatgatcaacggcgaattgtacgtgcgcttgagatccatcatctcacaggcgagaagtggtctgatcagctggcagtacagaagaaagagtcgccttatgaccttcttattgttggtttgacaatggatcggcagaagttgtacgcccgggtagaagagcggattgatctgatgatcgaacaaggtctggtggatgaagtgaagtccctgttggaacgcggagtggccagaggtcatatttccatgcaagggctggggtataaggagattgcagcgttcctgcaaggggaagtgagttgggaagctgcggttgagtggttgaagagggatacacgtcggtttgccaaacggcagctttcctggttccgccatatgaaggatatagaatgggtggacatgacggatacccgggattttgaagggaaatacaagcagataagtgaattgattacacaaaaatttgattgatttaagcgaatattagtattcttctgacaggcatcgattaggtcaagatatgtaaacctctaccttctggtcatcaaaaggatagaggtttttacttatcactagaacagatggtagagattaaacattcgccaaacaacgaataaatgtgctttaaaatgaagaatttgtccctcttttgcaaaacagacaagcggtgtataatggataagtcttctatttgttcacctcgctaagaatgggggtaaaatagcagacaaggggtttttgtggattatatgaaactgttcatgatataatagcacgaaagctactcagcgatattgaatattacttgaacacgaattcaaatgaaccaatgggggtacggctaatgaacaagtccatcaacatccaagatacgttcttgaaccaactgcggaaagaaaatattcctgctacggtctatctgaccaacggcttccaaatccgcgggacgatcaaggcatttgacaattttacgatcgtcattgacagcgacggacgccagcaaatggtctacaagcatgccatctccacgttcacgccgcaacgcagcgtatcgctgatgcagcaagataacagcggcgaagcttaaaaaaattacgaaaccttttcaccaaccatttcgtctacaagtataggtattgaaacagagcaacctgaataaagggttgttcttttcattccgggcgaaaaatgtttaatatatgcctgagcctacagacgattagaaattatgcaaccgaaagggagtcaggaggtaacatgccaaacgatccgttgtcgaggtctaacaatcgcaacaacaataataagtcacccaaaaaagcgaagccaaagacctctaaaaagaaaaaaattacgggtaaacgtgttggatggacactgtttttcacaatggcaatcgccatattctgtgcacttggcggatatttatttattatggtgagtggtgaaaatctgctcaaagccaataaggacaaaaccacaattaatgaaacttcaaaagtatatgatcgcaatggccaattaatgggggaactatccattcagaagctggaacccgtcaaagaagatgatattcctgagctggtgaagcaagcctttgttgcgaccgaggataaacgattctacgatcaccaaggcgtggatatctggtccattgggcgtgcagcggttaaggatgtcatggctcgttccatggtggaaggtggtagtacactaacccaacagcttgccaagaacatgttcttgtcccgtgacaaaacgttcttccgtaaagcaacggaagtatcgattgccatggcattagagcgcaagtacacaaaagacgaaatcctgacgatgtatctgaaccggattttcttcggtcatcagcgttacgggattaaagcggcatctgaattttactttggagttactgatctcaagaggttgaagttgtggcaaattgctacattagcagctatgccgaaagggccttctgcctataatccggtgagcaatccaaacgactcaaaagcacgccgaggtgtggtattgcagctgatgtatgaacaaggttacattaccaaggcggagatggacgaagcaaaagagattaactataactacaagcgaccagagaaagacaggaagtatcaaggttttatagattatgtgctccgtgaagctgaacgagtaacaggtaaaacggaagatgatctgaatatcggcgggtacaaaatctatacaactatggatgctcaggctcaaacagccatggaaactgccttcacagatgataatctgttcgaggcaagtaaagacgatcaacaggttcaaggctccatggttatcatgaaccatgagaatggtagcctcgttgccctcctgggaggacgggattatcagactaaaggttatagccgtgtaacgcagagtcgaagacaaccaggttcagcttttaaaccgattgtgtcttatgcacctgcgcttgaatcaggaaattacagtgccaactcatcgctgagtaatgcgaagcaatgttttggtaactattgtcctggtaacttgcatggatattcttcaacgatcagtatgacggatgcaattacgaagtcggaaaatatccctgcggtttggctgcttgataaaataggtgttaacacaggcattaattttgccaagagtgtaggcatacagctgacagatgaagacaaaaacttggcgattgccctcggtggtctaagtaaaggtacaaatacactggaaatggcgcaagcctatagtgcatttgccaacctcggagaataccgacaagcctatgcgattaaagaaatcaaggatagcgcaggcaaaaccacttataaacatgataactcggacacaacgcgtgtcatgagtgagcaaaatgcgtatcagcttacacagatgctgcagaacgtcgttaatgacggtacgggacgttcagcacgtctggatcgtccggtagcgggtaaaacaggaacagttcaaagtggtatctctggcaatagtgccaaccgtgatgtatggtttgttggatacaccccggaatggactgccgctgtctggatgggctatgacaatccggatgccaatcatatgcttaagaacagcagtaagttgtcggcagctttctttgccaaagtcatgggagatgctttaaaaggcgttccagtgaagcaattcaaagcaccagctggagggcaggcacctccgccagtagaagaaccagaaaagccggctctgtccgttagtgggctgagtggatcatacgatccaaatgcacaaaccgtctccctgagttggactggaacgggtgacgcgagtacgcaatatcgaatttatcggaaagaaacatctgaagcccagttcactcatctcattgatgcaataggagcgaccaatgcacaagatttaagtgcgttgcctggtctaacctatgagtactatgtgacagcttacgacttggcatcaggacttgagacggatccttccaacaccatctccttgatgattgaagcgcaggaagtaccgccggaggaacctgatcctggtatagaccctggaacagagatagatcctgagcagccaggtacggagaatccggacaatggtacaccggataatggcaactcgaacggtaataacggtaacggtaatggtaatggaaatgaaaatggcaataacggtaatggtaatggtaatggtaataacggaaacaatggcaacggtggtaataacggcggaaacggtcaacctggggaaggaaatacgaccccacctggtcagggcacaacagatcctggcggaaatggtgaaggttccgatgacgggggcgtaacaacgccgggcgaagttgtaactccggacagcggaacaagtggggatactggagggacagatgcacctgcagattcccaagctggcaccggcggctaagccaatgaatcactaaatagctacattatagctacattgaaaaaactgcttcctgggaaaccggtgaagcagttttttttgtgttatacaaaaccaactctaatggaaaccgatttgatgaataggtgggacaaagcttgattttgagtgtaaaccttaaatatggtaagctgtaactattcgtaatacgttgtgcaagggcgggcccagagcgctggaatccatcaggcggacgttattacattgttcaccaataacatcagagcaggtcacggacctgtagtcggcaaagaggggttcgtatgaaacggaaattcggggatcgcgcgaactggcgccggattacgaaccgacaattcacatgccggttcgttcaatccaaaattttcacaggttatattacgttgtacactatacaggatttgaaagaacctctgtggaaaacttatggaggcagtaccttctgtatcgcagataaaggttattcctggctgcaatactatccgaagggagagcactttgtagttacggcgatgtttgacgatcaggaacggattgtagagtggtacattgatacatgtcgtagtcaggggataaccgatcagggtgttccttggtttgatgacctgtatctggatgtcgttgtactgaaagatggagaagtttttttgctggatgaagatgagcttgaagatgcactgtcacgaaaacatattacaacgggtgattatgacttggctaacaagacggctaaggaattgctgcatgccattgatgcacatgtattcccatactttcagttatcactgaagcataggccgagtttatttgagaacggagagtttcgaaaaaacattcagatttgagacatctaattatccgtagaattcttcatgatccttctaatattggagcacctgatagaatacattaataatcaggagagttcagcccgataaaatagaggtgatggcgaatgaacggacgggtcatggctgcaggagagcaaccaggaggcagaccatccagacaaattaatattgtgttgcgtaaccaggaacctcagatgttggtcaaagatgaagcagcggcattacaggcagccaagagtataaccaaacatgcgcacttccaggagatacagggtgaattggagcaactggttggacttgaaaatatcaaagacttggtgtttgagatctatgctttcctacagattgctcagatgcgtaccgaagcaggcttacttagtggtgcgcacgtgtatcatatgatcttcaaaggcaatcccggaaccggtaagaccaccgtggcgaggatcgttgccaaactctttcagaagatgggtgtgttgagtaaaggtcatcttattgaagtagagcgtgcggatctggttggagaatatatcggtcacacggcgcagaaaacaagagatctggtcaagaaggcactcggtggaatattgttcattgatgaagcttacagtttggcccgcgggggagagaaggattttggcaaggaagcaatcgatacgcttgtaaaatcaatggaagataacaaaaatcagtttattctcatattggctggttattcagatgagattgatttttttcttcagaccaatcccggattaccttcccgctttcccattcaagtggagtttccagactatagcattgatcagttgattcaaatctctgagattatggccaaagagcgtgactatattctaatgccacagaccatactcaagctaaaacaacatttgcttcaggaaaaaaatgattcgctgcatgcgttcagtaacgccagatacgttcgtaatgccattgagcgttcgatcaggcatcaggcagttcgtttgttggaacaatactcggaaggcagtccaggaaaactggagctgatgacaatccgtacagaggatttgaactttgagcgaaagtaagcgataatatagtttttacaccagccggccgggccaaccggttcggcttaaggcatgccatggcatattcgtggcaatgtatatcaacggattaatttagtaattagagggagtgaacatatatatgacaaatggcacgcatgatacagatatggtcaaaaaagatcgcgccgtcttggtgagtcttgttacggatgatgtaaaacgtacaggtatcaaccctgagtactctttagaagaactggtgaaacttgccgagacagctggagtggaagtgctaagtgtactttctcagaacagggaaaaacgtgataccaaatggttcattggtaaaggtaaggtggaagagctccgtgcgattgcagaggaactgggagcaactacagctatatttgatcaggaattgtcaggtgcacaggttcgtaatctggaagaaaccctcgatctcaaaattattgaccgtacccaattgattttggacatctttgcacaacgggcaaacactagagaaggtattattcaagtggaattggctcaacatagctatttgctgccacggttgtcgggtcatggaaagaacctgtccagactcgggggcggaatcggaacaagaggcccgggggaaagcaaactggagacagaccgccgtcacattcgtggtcgtatcgatgatctgaagcgtcatctggatgaattgactcgtcatcgcaaattgcatcgtgaacgccgtaaaaaaacaggtattgtccaggtagcccttgttggttataccaatgctggcaaatcaaccttgctcaagcagttgacggctgcagatgtgtatattcaagatcagctattcgctacattggatcccacttcacgtacgatggaacttccaagtggaaaagaaatcgtacttaccgacacggttggatttattcaaaatctaccgcatgatctgattgcagcattccgggcaacgttggaggaagtgaatgaggcagacctgatcctgcatgttgtggacgcctcatcagctatgcgtgaagatcagatgcggacggttaatacgattctgcaagaacttggttcaggggacaagccgcagttagtcctgtataacaaaaaagatgcgtgcacaccagagcagcttgagatgcttccattggataaagaccatattaaagtaagcgcattagactcggaggatctgcttaaaatccgtgaattcattcagacagagctgacaggtgatacgaagcgcttccgtattccggcagaacgtggtgatcttacgtcggtactctataaaattggtgatgtagtggataccagctttgaagagagtgatgtgatttatgaagttgaattgcaaaaaggtgaatatgagaaatttggttatatgcttgaagaattcattgaattgtaatattcatgacatattgatgtgataagttacacgataatggatattcgacgtcagattcgtgctatgaaggggaatgaagtaagatggtaagctttgattcagaaatatctgaacttcaacgtcaagtggagcgtcagattgaaggacaactgcaacagattgatcggatcacagatcacaatcaatggaaggtgattcatgctttccaacagcgaaaagtaagtgattttcattttgcaggttcaacaggttatgcctataacgatcgtgggcgtgaagtacttgatgaagtatatgctgatgtattcggcgcggaagccgcgttggtgcgtcctcattttgcttcaggtactcatacgattagtacagctctctttggcgttttgcgtccaggtgacgaattattgtacatcacgggtaagccttacgacacattgcataaagttattggcgaacccggtgatggtacaggttcattacgcgattttggcatcggttaccgtgagacggccttaactgatgaaggtggagtggactgggcagcagttgaaaaaagcattacaccggctacaaaagtcattgggattcaacgttcacgtggttatgactggcgctcatccttctgtgttgctgagattgctgacatggttacgcgtgttaaagagcttaaggaagatgtcatcgtattcgtagacaattgttacggtgaattcacggaggaacgtgaaccgacagaagtcggagttgatctgatggccggatcactgatcaagaatcctggtggaggcattgcggaaaccggtggatacatatgtgggaaggaacaatacgtacagctggcagcttatcgtctaacagcccctggaattgggggagaggttggagcaatgctggggacaacacgtggcatctaccaaggactttacatggcaccgacaattgtaggacaagctatcaaaggaagtgcgtttgctgctgcgatgtttgctgaatccggatttgtaaccaaacccgcctggaatgaagctcgcacagatctgatccaggctgttaagtttagctctgccgagcatctgatcgccttcgtgcaggggattcagcgtgcagcagctgtggatagccatgtggttcctgaaccgtgggatatgcctggttatgagcaccctgtcattatggcggcaggtacgttcattcagggtggaagtctggaattatcagccgacgcgcctattcgggagccgtatatcgggtatatgcaaggcggattaacgtactctcatgtcaaatatggcgttttgatggcgttacagactatgaaagatcgtaaattattgtgagtttatctaacacgtcattgacacttggtaataactaaatgtacaatagggtgaagaatagatgactggaaggttgatgaacatgggtgatgaaatccgcagaaatatggccttattcccaattggtattgtaatgaaacttacggatctgtctgcacgtcagattcgttactatgagcagcacagcttgatcgttcctgcgagaacgtcaggtaatcaacggttattctcttttaatgacgtagagagattgctagagatcaaggctttgattgaaaaaggagttaacatcgcgggcatcaaacaagtgatgaatcctgtttcaaaagaatccgaggaagctacagttatcacgccagatactgaagttaaacgcagagagctgtccgatacgcagttgcaccgcttgctgaagcagcagcttgtatcaggtaagagaccaggacaagtatctctcattcagggagagctttcccgattctttaataaaaactaaattcgcataacttggcgagtgaggggaaaacatacacttttggtgtgagactccttgacccgtggaactttctaatgtacaaatataacaggcaagccaaatacgcagataagaaagggagaggttatagtgagttatacaaaagaagacattctccgcatttcgaaagaagaaaacgtacgattcattcgattgcaatttactgatttgcttggagctatcaaaaacgttgagattcctgtgagtcagttgactaaggctctggataacaaaatgatgttcgatggatcttccattgaaggttatgtacgtattgaagagtccgacatgtacctctatccagatctagattcttggcttattttcccatgggttgcagagaaccgtgttgcacgtctgatttgcgacgtatatcttccggatggtaatccgttcccaggagatccacgtggcatcttgaaacgaaacctgaaggaagcccaagatatgggattcacttcctttaacgttggtcctgaacccgagttcttcttgttcaaaacagacgaaaaaggaaacccgactaacgaactgaatgaccaaggtggttatttcgaccttgcgcctacggatcttggtgaaaactgtcgtcgtgacatcgttatcacacttgaagaaatgggctttgagatcgaagcttcccaccatgaggtagctccaggtcagcatgagatcgactttaaatatgctgatgctctgaaagcagctgaccagatccaaacgttcaaactcgttgttaaaacgattgcacgtcagcatggtttacatgctacattcatgccgaaaccgctgtttggtatgaacggatccggtatgcactgtaaccaatctttgttcaaaggcaatgagaacgcatttgttgatgagtcggacgagttgggtctgagcaaaactgctcgtcacttcatggctggaactctgaagcatgcacgcgcgtttgcagcaattactaacccaactgtgaactcatacaaacgtcttgtaccaggttatgaagcaccttgttatgtagcatggtctgctagtaaccgtagcccaatgattcgtattccagcttcccgtggtctgagtacacgtgttgaggttcgtaacccggatccggctgctaacccttacctggctttgtctgttctgttgaaagcaggtctggacggaatcaaacgtgagctttccttaccaactccaattgaccgtaacatctacatcatgtcagaagaagagcgtgtggaagaaggcattccaagcttgccagctgacctgaaagaagcattgaatgaattgatccgcagcgaagtcatctgtgatgctctcggcgaccacgccttggctcacttctatgagctgaaagaaattgagtgggatatgtaccgcacacaagtccaccaatgggaacgcgatcaatatattacgttgtactaatagctcaatcccttggcgctctagcgctgaggggtttttctttttgtgggcaaatacctatatatttaaagaaaaatcaatgtgcccacaaaatgcccacaaaatatttttctattcgaaaatttcttcagtgaatttctcaaatctatctatattgcttttctggattttgcctgagatgtgggcatatacatctgatgtgatctgaatacttccgtgacctaattgttcttgaacgaatttcatatctgccccggactcaagtaaaagaacagcgcaggtatgtcggagagagtgaatggggagggatgggagatcacaacgttgtaagatgcgggagaaggcattgaacaatgatgatttaggcatgaagtttccatcttccctacatagaaccagatcaaggtcatggtggtatctatccccaagtatccctttgttatgttcctgccactctctgtgaaatttgatgtcatttactaagacttgtagtaatttttatttttctttctgatttttctgtcttggtgtcaccgaataattcttctttgtttttcgctgtaaaatctagagtttcatcaattgtaatgaaatgattatccaaatcaatatcgatccattttagagcagctgcttcgccttttcgcataccagtttcaattaacactcggaaaaatatccagtatacataaccataatgacgagagttttgcataaacaatggtatatcatcggaatcaataaagtggacttccttctttttgcgcttaatttttatttcgacacctagacatggatttttttctaattttcctattgtaacagctttttgtaaggcgttatgcattgtggaatgaatcaattcaaccgtacgtcggctatatcctttctcactaatatggtttataaaattttggtatataattggtttcacatctcgtataagtatgttttaaaaaaagggataatatgatttttaatgttgttctgatgaagtaataatgtattcttacgaacacttcctttcttatattcgttgatccaaaaatccagataatcttgaagcgataaatcagattgctcatagtcagcagcaagctttctttcaaattctctaactgccaactgcagaagaagaaaatgcttatctgaaagcgcaggtagaatatctcaatccgaatttgcacggagagggaagctggatttcgaagcccggtgccagtccgttcgagaaataagtaagtgggcacctgtggtttggttgtgtaaaattgctgaaatttctcgtgcaggttactacaaatggaagaagaatatcgtcctccgagagaaacgagcagatcgggatacggatctaaaagcacatattttaagcattcaccggcttcgtccttatttcggctacaaacgtatgcgaaccgcgttaggaaaggaaggcctcgtggtgaatcacaaaaaggtacgccgcttaatgagagaactccagattcgttccgtgattcgcaagaaacgtccatttgctggccggaaaccgtcagttctattccgtaatgtcttaaatcgggaattctcggcggcaactcctgtgcagaaactcgtgacggatattacatatgtccggatcgggcatgattttgcttatctctcggttgtgatggatctatacaacaacgagattgtagcttgggaactctccgagcgaaatgacttaaaacttgtgatggaaacggtaaagaaactgaaatgtggaccggccttactccattccgaccagggattccagtatacaacacagagctatgccaaattgcttgaagagaagaagctaacaggaagccattctcggcgtgggaactgctatgacaatgcatgtattgagtcgttcttctcccacttaaagacggagaagttatatttggagaagcctcagaatctggaacaagcaaggaaccaaattacagagtatatgttgttttacaacaaggaccgtttccaaaacaaactcggcgacctctccccaattgaattccgggaaaaagtcgccgcttaatggagtttctctttttttattgtctacttgacggggctatgaccaagcagggttaaagcgatttttcttttctagtaataattcagctaattattattacatcaaagtaagcaatcttggttttaaaccatctactatacggctatatatgaatgcaagaaaacttacttgtttagggaagaatgttgatgaagtaagtaacggttaccccgtttactggggatatggcaattcaggaggtacagaaggaggatatttttccgtgttgagtctcaggcaacaaatcgtatctttattgaagatgggacgtttcaggttcctgtacctcggatgtccgactctgattttgcagtgaacagcgttatttattgggaggcttattcttaaaaggaggtgctttatgaattatctaggttcaaaggtctactatgataaagcaaccggaaacattatttttaatattagagagtcttatggagacgttgttgaaacaacgatagagcaggactttcaatcattcgaattgctatcagaacgtgttccagataccgttggtttacttcaacttgaatacggggcatacgagacagattatgatgcgggtggacaaatcactcggatcgatctggaaacgatggaaccactgtttacgtatcctgatccaactgatccagagacgccacaggagccacgtccggcaattagtaaacaggtggatcaattagctgaagaaagcaatgcaaaccaactggcgctcatggagctgcttcatatgatgctgcttggtgagatgccagatgcggaataatcttgccagactgctgatccgttgggctgtagcgctcatgagagggggtgacaccatgttagctgtatacgtaatgatgatccataagggcttgatcaagctggagcaagtaccagcaggaagccgtgagaaagtggctgctgtgttggaagtggcagagatggaccaaaacggaaatatcgtgtaataggcgttccgacatcggagcgctatttttatgactgatttcagaccatttaacaacttatgagctaaatcgtatagacctaataacaacaaaaggagggattaaacatgccaattgaaacgaatcgattgaaactgccgttgcctttgggaaatgaaagtgtaagtcgagtaggtattaatgccatctttgagaagattgatgagggagtagctacccgcgaggaagtagagacattacgagaattggtgaatgaattggacattccggatgcatcgttaactcagaaaggtaaagtgaagttatcgaacaaaacaaacggaatatctgaatccgaagcgccaactgaaaaggcacttggagaggttatgacggctgctcaatcagcgcaagggatcatcaataatcgtaatggatacggaacaacaactaatagtggaaatgcatattcagttgctcttactcctgcacccacagcatatgtagatggacttagaatcacgatcaaaattaacgctgctaatactggtgcagtaaccattaacgtaaacggacttggtgctaaaagcgtccttaaatcaaatggtagcgcgatggcttccaatgcatttcgggcgaactcggtatactcgctggtatacaatggcacaaattttatcttacagggtgaagggggggagtatggaactgcagtagcgggggatgtcaggtcaactaagacaatcggaacggacacaggtttattaaccgggacgctcataacaaggaatacatcgcctacaatcatcgtcccgaacggagcaacacaaaatttaaatcctggtatatatgattatccaataactttatcagcaggtgcttcatacgcttctggaaattctacttcatcctcttctgggatgtatcctacaactggatttcaagatgcttatttttatattactgtaacaggtttaggattcagacctaaccgcgttattcttaaattcttttacggttctggtaatttcatttatgtttccatgggaacttatgattacgctactaagaatggtgcaccgacagttggaggtacaaatttcaattatattttggtaggtgcagaagtgaatgaaatgcctaatcgaggtttcgttcgtgtccatgagttcagtggaacaaccctaccatctaccgggtttgctatgacagacaattcttttagactacccgtattcagcggttcggtaaatgtaagttgggaagcatttaaagtataagcggggggggataattatgcagcttggaatgaggatttactacgaaaaacaaacaggaaatgtaatagtaaacacaggtgaacgaactggagatgtcgtggagacaacacaggaacaagatttcgccgcatatttcgtcttaaaggaatgtgtaccagaaacggttggtatgatccagctggaatacggtgaatttacagcagattatgcagagggcggggttattactcagattgatttggacacactggaaccgctgtttacttatcctgaacgagtagatacagagactccgctggaacccgtccagcgctcagtaaacaagtggaagttttggcgcaggacaacacactcttgaaagcttagagcaatatggagcgctcattttttgtataattagtaatggtttaagtcagcacagagttcgatatttcaacataaccctaatatgattatattttacaaaagatagtaaaatgttataatatattctaatcggccgattccataagatagtaaaggtggaataatatgaatttcaaaaagacgttgacttcattgctcgctcttattattatgttttcgatttctgcttcagtatttgcggatggtgcggatgttagacctaccgtggctgggatcgctgatacaagagagaatgccctatcatacattccaggtaacagttatagtctatttctttcagatagcaatgataaggattggtacaaatggaccaacaccggagctggcagattcatacttgtttatctacaaccacaaggacaaaatataaaatttaggatgggaatcgaaatggttcacaaggatggtactgaaacatctagattctacgctccaacactaaatggaaatgaaaatggcatgtacattagaaatctgtatgttcctgaaggcgcaacagtttatgctgtaattgactctacggagttcatcgctcaaggtcagtatacatttatgttagatgcatactagtaaatgagataattgccctcgaagatattcgagggtttcttgcatttaaattaatgtattaggtcagggaagtaggcttttgaaagtgatgatgaaacaaaactaaatatcttcctaaaaaacacgttccaaaacggagcgtgttttttaatgccatggagtggtcagttctttatgaaaggagctaaggtcgtgtttaaccgagaaacttttaaccgcatggcctttaaccgccaaatatccgtattcgtgtttggacgtgctgttgcgaacgtttctggatctgctgtagctactgcaacgatggaaatgacgggttcggcggttatggatatcaatgcgggagcgcgagcggagtttgttcgtgaaatctcatttgcggccgttgcatgtagctgccggaactaaggcggattttgtccgtgagattaccaaacgggcgattatgaatgtcggttttggagcagtcgccaaggggagtcgttaccatgtagaattccttgaattcactggaccattccggccaggtgatcaagttgttatcgatgccaattcgtacaaaataactcgaaatggagttaatgcttcacatttgcttgaaggagatttctttgatttaaaccttggagaaaacaatctcacatggacagacactgaaacaggtagaaatgttctgatccgtgttacacatagagacaaatttctgtattgatcggggtgaatcatgcctaatccaacaatgaaagtattcgataagaacatccggcgtgtaggtacgttggttgatagttcagatatacaacgaagaagacgtattaacagtgactatgaggtaacatttatggtcccaatgacctcagatgattaccgcgaaaaaatagcaatcaaaggccacgttcaagacgaacgtggccaattttatgttatacagtcctggatccggtcccgtgaaggccgcaagctcatggcatcaatctattgcaaccacgtcatattcaagctgaatgatttcaagtttccgtatacctcatacattgatgaagcttatggagtgcatataaacgagctgacacaattaatcacagtagctactggtggaagattcacattcattatccatgatacgtttgatttacatgacgttaaggattttgggcgggggtattgcccggaagctttaaataaaatcgttgatatgtatgaatgcgaagtggaacctgataatttcgtgattaatctcagaaaaagaatcgtttcagaccacggcttgcagtaccggcttaaaaagaacatcgtatccagttccttcaaggacaaaggggaatcccttgttacccggatgtatgttcaaatgaaggatgaacggacattcatcggtatggatgcttccttgctgacggatatagagagaagtctattgtcgagcataccaggaacaattgtgaatggtaaactggcggtcaactatcttgtatcaccatttgctcaatattgggcaagcgattcggttccgttttacgatggagaaattattgagcaagatatcgaagaagcagaggatctgctgaaggctacacgcaaggcgctgcttgagcaggaggttgtttctctggaggcaactatatccacggcagacctgttcaaaatcgaccacactgagcctaaacttcatttaggtgatgatgtcatgtgtatcgacccagacatgggcatgaaccgattgaaagctcgtatcactgaacttacagagtatccattcagtatggacaagcatgccgaaccgacgatctccaatatcaatttaagagattacgatgatattatcagtgacctagaacgcaataagaatatcaccaataacctattttcaaatgggaagatccggacggatgtctttgaatcatttgctaaacaagcggtcattgatattaacaatagcaaaactgaactgatctatcctccagaaggtgggatactggctcaagagaaaacgaatcctttggaacaagtcagattgacttctaaaggtattgggatatctacagatggctggaaatcgatacgtgctgccataacagccaaaggcgttgtagcggagcaagtaataggtcaactcggtaactttgtctccatgttaatcggtaatggtgaggatattgtacagattaatataaacggcattgcagcaggagcatcgtcatttaatagcgcacctttcagactgaacatgaaaggtgacttgatagcgaatagcttaactgcgaattacgcgaacattgagtactccaacttaaaaacggggccatcgttggttcctcaataaacgtaggcaatggaatgttcacagttacttcaggtgggattatgtccgcagtaggtgcgaacttctcaggatctattacagcttcgattattacaggtacaaatatcaatggtggtacaattaccggtgctttaatttgaacagcagtaagcggaagacgaattgagcaagactcccaaggatttcgttcgtatgatgccggtaatagagtacgaattcaaatcgctacaacagaagatgctactgcggcagcgattatttggagagatgcaaatgggacatctgtaggagaaattaattcttattctaatagcggcgttttaactatgtatggtaataacattattatcggttcaaacaacaccggaaatactattcgtcttcagggaacagttacatttgctggtcctgttaatggtcttggtatctcagatattacaggtttacaaactaaatttcaaatattcggacttctgtcgctgataaagcatcattaaaccacactcatagtcaatatgcggttaatatgacgtatgattcaactacaaaaaatctcaagttgtacaatcaaagcagaatagctatcgctaccgtaaacattgcttgaagaccaacctaaaaaagctaattagatgctgaaaactgggatgtaaatctttacgacatctcaaccgtaatgtatcacaataggtaaatttaaccattacggaggttaatttatgaaaaaggttttatacatcgcgatggggttcctattagggattgtctttatgacagcaggcgtcacttttgctgatcaggtcaaatcgcttgttgggaaaaaggtcacgggtgaatacacaataatcgtagatgggaagaaattgtcggacaagggtgcagttattgacaataaagcaaatgttccagctcgcgccctgtctgaagcattaggagctgatgtttcagtgagtggaaaaacaataacaatatcttcagaaaattcaacatctcaaccgtcggagtcaacgaatcagataactgttaaatatcaaaatatgtcaaaatccagtttagaaagcagttcgaaaaatcttaaacaaaacattcttgagccaactctgcgtgctatagatgaaatagaggatagtattcaaaaagttaaagacgaagataaggagtatagagaatatttagaaagacaaaaacaaatctatagagtgtcgattcaacagtccaaggaatcaggtgcttatgatatggctgctgagtgggaggggcggttaaaagaggtcgaagacctcttggcggataagaagccatctaatcaagattcaatcttgaaaaaagaaaaggaattggaagaactgaaacaagtcgtcagcaatactgaatccgaaataaaactaattgatgaagcattacttactgctaaatagattaaagggtccgttatcgacggactctttttttgtttgtgtgactataaatccgtagccactccgtaacaaagataaaagataataaatccataaagccctattccttaattggaaggggcttattttcgtatagagaggaggaaaggtcttggcaaagatgacacatacactccaagttgaactggatttgaatcaaccggttgaagaattgacacaggtgattactactgtccttagctcgcatccacttaatcaaaaagagattctgacagctttagatttggagatcgggaatgcactggcagcaattgaaattcaagaacaaaaggataagccagaagttaatgattaggtcaggaaatttatcctgaacagagagatgggggattaatttgactgacacaactataagtgaggtgaacagtgttgtggaagagactacaaaagttcttatgggtatccaagtacagttggccagaatggaaaagacgcttgaaggagtaccggcaatggctgccacgttggaagctacacgtgatctggcaaaggaagctatgcaatccaccaagtcggcccaccacaggctcgataagatcgagaatgctcagacctggttgtggaggactattgctacaaccctgattggtatagctatcggggcaattgttctaattttgaaaccaggaggagtgtagaagatggattggagcactgtattttcgttaatcgatcctaagttatttattgtattggctgcatgttgggtgcttggtattggtataaagcgtatcccgaagattccggactggaccattgttttcatcgtgactgcattcgctattgttattacaagttggacccttggctggtctcctgaatcgcttatccagggaatattggttggagcatttgcagtgttcggtaaccaggtgattaaacaagcgaagaaaggaactgaacagtcatgatctcaaagggaaatttcttgctgctagagtcatccgaatttaaagggtggctcgacaaacagaagataacaaggagcatagacaagctccaggtccatcatactactgcacccaactacactactcgtcaggtggtcaatggagtagcgaaacaggatgtatggaaatgtcttgagggaatgaggactttccatttatctcagggatggtccggtacagggcagaacataactgtacttgaggatggacgtatcgctatcagtttagatcgggatctcaataaaacgcctgctggaatcaagggagcaaatacaggcgctttgtgtattgagatcataggtaactttgatctaggtggagacacgatgacagccgtgcagaaacaatctgtaacccacctatacgcctgtctcgcactaaaactaaatatccctattgatacatcccatattgtgtatcacgcttggtatacgccttctggtgcatggttaggtgattatgtgaacggtaagtccagaaagacttgtccggaaatcaaattcttcggtgacgggaatacacgatctgctgctgaaagaggatttattccggcaatcaaagaggaaatcaagctaattaagaaaggggatggagatccgatgacatcagaagaaaagaaacaaatggaggaattgaaggcaactgttgagtctcaggcaaagtggatagcagttcagaaggtcaaggagaacatggaatgtcctaaatgggcagaatcagcttatgagtattataaggattatataaatgtcaaaacggggagctacgattccgggcgttatttagccatttcctttcggaaagagaaaggtactatagtttaagtaaattgagttcctagttgtattttgtccttttctagttgaaaaacaatcgaaaaacatacctaatttcttctttttagagtcgttgtattttttttattaatcaaaatataaatatggcgattctagtgaagagtcgtcatatctttacgtccggattagtacatattaattggaggtgattaacatgaatgaatttgataagttaataatcccttatactgtacctaacataaccatagtgaataaattgactggcgaagaaagcgtgctatatgcagtagattcaaagggagaaaatgttcttataggtagtgggcaaagggaaaatactaaatattggttcaaaacatgtgaaattgttacgaaagaaatgattctcgaaaattatagagttcgtaaataatttagttggtgtgatataatccattttgaaaggagatgatagttgtatgaaggttgaatcagttacaattgagaatataaatggtattaaaaatttgaacattgatttgaacagtcacttaaatatcatttgcggtatgaatggagtaggtaagagtactattctggaagttatagcgcaggcatttagcattggtactagtaaaaagataaaacgtaatgctcgagccgacagaggagttgctcaagttaaagtggatgggaaagaaagtagatatgaaatatcggccttccagccaaatgatacacaaagggaatatactaagcccgttggtgaagccttgaaagtaatatacataaaagatcatagattacttgaatatcaatcactaagtggaattactgcagatgaagagaggaatgagagtaaccatacacactacatgatacatggtgttaatcctcaatctattaaaacttggctatcaaatagagtgctttttgaaccacagggaaaattcagtgaagcagaaaaactaaatttaaatgttgctaagagatgcttctctcttcttgatggcagtgtaaagttttctcatatagatcataaaaggttagatattatgattgacactcctggaggcgagattttttttgaatacctttcctcaggctacaagtcagcattttttattttattagggttaataaaagaggttgaatttaactcaaatcccaaagtgaaggtttctgagtttgatggcattatattaatagatgaagctgacgcccatattcatccttactggcaagccaggttaataaaagctttaagaatcattttcaaaagtgctcaattaatcattactactcatagtgcccacatgatacaagctgcagaaagtgaagagttaattcctttgggttttgatgatgaaaaagaggttattaaactcgatctaataaaatcggattatggctttaaaggttggactgtagaagaaatattggaagatgtaatgggtcttaaggagacaagatcaaatgaatatctgaaggctaaaaaagattttgagaacgctttagatgatgagaatcatcaaaaagcctcgattgcttatgatgttttaaacaaaatgcttcatccaaggagtccgatgaagaaaatatttgaaatccagttaggatcattaggtgattagaaaatgataaaaataataagaacattgcctcctcatcaaatgaacccagaaaaaattaagcagctaactgaagagtatatctataccaagaggaacgtgtggaatttggaatacattaaaaatgcattgttagacatgtctaatggtaagtgcattttttgtgagtgtaagctgggagtggagagtaaatatattgaggttgaacatttctatccgaagtctctgtatcctgaagaggttctttcgtggacaaatttactaccgatttgtaaaagatgcaacggtttaaaaagagatcatgataccaagataaatccaattattaatcctactgttgatgagcctaaggatcatctgtttataaaggactatcgatataggggattaaatgatataggaaagaggactataaaagttcttcaacttaatgattctgatcgtcttgtgttaccaagatttaagataggagacgctatagcagcggcaatagagtctttagttaaagttaaggataaaataaatatggatacgaaagtagaagatgagaatgagttgattggtaaacttagaaacctgcttgtttcctgccagcctgattccgaatatagtactgtctgttcatatgctttgttaacagatgaaaattacactgaagttaaagactaccttgttagtcaagggctttgggatttggaattagaaaggctagaaaccgtaagtctacaacattcattgattagagaaaaaattaacttagcttagcgtatacaaaaaaaattccttgtcggatattttaaataaacaaaggcggcagatgattactgccgcctttgtttatttaaaatgtatttagtgattctaatatgctcgtaaaactttcgtctatatagtttagtccactgtaaacctgattcttgaaaacgtcttccttcagtttgtccttaccattgtaatgatcaacaatttgttgaatgagcaggcctttgtatgtgttcagctctttgagttgagcatttgtaccttgtttaatctccttaatgttcagagagcattctttttttgcgactgcaagtagcttcttgtctgaatctcgttgtcctttggcttttgcgatcacttctttcgatgccttacttttcacaactgttttatatttgttgatagaagctttatatttttctgatgcgacctttacgttggcacatgcagttggagcgagttttttcagagctgctttgacttctctcactcgtgaattgtagtcttcgaaataggacttttccacttctgatttagacatattaaaagcgaatgcttgaaccggtagtgctaatataagcagtattactagtgttatagcttttttcataacttgaactccaattcatagattagtattttgtttaaaagagacgactcataataatattgttactctagtggtaatctaactaaacgacaatagctcagtctagcgaggtaattcacctgaacctacatacttattttttgtattgctccatgtgtaagtggcaatggccaacttccatccaccttctggataaaagtttttccaatattgcttaatgactccgttttttaatatcttcactccttgatcgcccataatggagagctttttctttaaggttccatctttatagttgtatgcatccagctgtgtgttagaggggaaataattaaatgtaactgccacatgtttttccttttttgatacttggtaaatatgtatttccggtgaatccaattcctcgtcgctgataatatttttattgataagcactatgacacctttagtgttaattaaataaaagttgccggagtctgttatcaacaagtgttcttttttattgtcatcattcagatcaacagacttactgatagtcactcgctcttcaggatatttcttttctaacagtttctttggatttacgtcagcggcatcaacgtttgatggattaaataccaaaccaaacatagccatggcacagattatcgctaatattctcttcatgatgattctccttcgtcattagttatcatttgagtcactagcactgaacattattccaatagcatcagatccagttattctataacgaattccgtttagttctgttgattcattaattgttgtccaatccccacaccttcattaagaatacccaggtcatcaagaacattaccaacagcttttgatggtaagtctggattggttgcgagtattaccaaaccgatagttaaaacaagatctgttccagatgaaagagtgccattaccttggcctatcatcattacatcacgtaatgatccgtctgctttgtttactgagccggctatacctatgtaatctgtggtcatatactggaatacatcttgagctggtccagtttcgatgtttaatttcttgccaattttcagtttggagttattaagctcatctgcgcgtttattgaacgatttacgaaattcttccggagtcattcccagagttcctggtatttctaaattcttatcctcttgcttctttacattctcttttgctaccttaacttcctcggacttagtagcagatttttcagcaacaacagtttctgacttggtttcagccggagcggaaacttcggctgctgcaactgcctctttctcagttttctcctcatctttgttgccgaagatacctcccactataatcacaacaataagccaaaaccaccattttttctgaataggctttttcaatcttcttcctcctgatatagtaataattaacaacaaaacatagtctatcagacctaggtataattttctataaaaatgtatggatatgggagaatgaatacatatcgagtactacaaacagatatggattacctcgcggcaaccttaacacaggttcggttatccgtctggcatgttttagacgatcgagagcacatcattgactatggcggtccggtggagtcttataccgcaatatccattaagatcatggggaagagatactttcgtaatacgtttgagtttagggtacaaaaatagagcaggagggataacctcactgctctttcttttatttggtcgtatattcacttacttcaaacgttaaaatcttatcgaatatcacgtaatctgtacgcttgctgaatggacctttgttgttgttgtatttattaatggcaaatttagctgggccagctcctacatcacgagcatcgtaccagttgaggaatgcattaacatcactcattggaagatcatattctttctccaaacctgttgtcattgttacgacgagtatagcacggttgctacttggttcttcgggttgtgtaggtgtttcaggttgtgttggattgtcctgtaatccaagatctacctcaataacagcccattctcttgaaacatttgagtttgccataagtctccaaccttgagctgcggttggttggggtaaattaatgacagtagtatcttgcaattttaaatcatatgttcccacatctttccactgaccatcattcaacttttgaacaattacacttgaaacagagaaaccttctcttgggtgttgttgcactgtgatattgcttacagtaatctctttgcccggtccaaaatcgtaacctacataagcaatacctttggtgctaatgttaggggaagactgccaaaatggaacgcttggagaagcctcgttcataaagtttccatcaaaagcatagtcaggcttagtattgggtgcattgctgcttgataatgcagttcctccagttggtgcaactgcagcaaagattgttgaaacttgaaatgccataaaaactaataaaaaactgaaggtaacacatagttttttcatgatttactccttaaaattattttattttaccgtacaaaaattattaaagaatgtctaaacaattatgtctatatattcaattaagtgttagatgcaatttaaaaaagctttatcgccctctttacggcgataaagctgtaacgctaacctatttctctcagtaaatcctcgttattatttctcacattaccgacttctttcgtcacttcatacgatctcatctcagaagccagatgcggtttgagcagacggagaagcgactgaacatcatcattatctcttccaagccactcagcctcatcctcagatcgcaagatgaccggcatacgattatgaatgtcttccattaggctattcggttcagttgtaagaattgtgcatgtactcaacttgtttccgtccggatctgtccaggtgtcgtataggccagcaagtgagaataagcggtcatctttcatcaggatgcgcataggttgctttgctgatccatcttttcgccactcatagaatccgttcgtcggtatgatgcaccgcttggaactgatcaaacgtttaaaagctggcttttcagcgatcgtctcagctcgtgcattaatcatcttgttaccgatcttgtcatccttggcccatgaaggaacgaggccccagcggagcgaacccaatcgatttccatccttgctgccgatgatcgttggaatgaactgcataggtgctgcattgtaattaggtttgtactcaaaaccatcagctatagatgcatagtacctgtccattatcgcgtctaaggggtcagtgatcgtaaatcttccgcacatggtaatgcctcctttgagactctatactatgtaattttactcaaatttttaagaatagaaacgggtaatttgtggagatggtcatccaatataaaataaaaatgcaatatattagctgatatttatagatcagcaagtttatgtttagacaggttgctatagttacattagtatcataatcaaattatagaaacttggaggtcttattgagaatgagaaagaaaataattctaatacttttaacagtacttttatgcttgcctgtatccgctatgtatgctgccgaatctgaaacagaatattctgagaacttgatacccaaaatgactagctgggattcaccttccggagtagcaagttctaatagtgagtggtcttactcatatagatcctttgatggagaccacagtacagttacaagtgcctggggctcagatagcgtcgcttcatggttaagatatgactttcctaaatctgaagttattagtaagtatgtaatgtacccgcaacaaaccgcaccggcaagagcaccaaaaaattggacttttgaaggttcgaatgatggacaaaactgggatgttttggactcaagaagcaacatttctgtatggttcgataatcaagcaaaagagtttgaatttaaaaattcaaattcatatacgagctaccgaattaatatttcagctaacaatggagatacgtatacttcttttagtgagttagagatgatgagcaaaaaaggatcagttccaaccccagaaccacaaccacaaggtaaccgtgctatcctcgtcgttaccatgacgactggtttagaaaaagaattcgatctgagtatggaagaagtaaataacttcatcgattggtatgaagggaaacaagctggaaatgggaaagcaacttatgctatagacaaacatgaaaacaacaaaggcccctttaaaaatcgtaaagattatgtattatttaatcgagttctgacgtttgaggtaagtgaatatgaaaactagaacatagaattttaattgattataattaataatttatttggagggtttattttgtacaaaaagattactgcgataattatatcgttaatactctttaatattatgtcgatgccatctgtaataaatgcttcatccctcgataatacagttgaggggatgcttgggtttgctccacctgagggaactgtagcaaaagctagtagtgaatatacatctcagtattcagctgagaaagcaattgataggaaaaaggaaaactattggaatgctggcacatatacagggagtattgaactaaaatttcctaactcaactgaatttaattttgttcatattacgactaatgcacagccagtaagaacggtttcatatactatttatgggctggaaaatggtgaatgggttccgattagtgaagaggtaactcaatctttaaaagagacttttactatagcgccacctattaaagttaagcaaggagcctatgaagccataaaaattgatggtaatggtggctcgtcttggttagcgataagtgaaattactctgggaacttttgaattaataaatttagttggagagccggaagattcatcagctaaactaaactggaacagcataaaagaagcgactgaatataaaattcagtatggaaccgaaacaggcaactataccgaatctattctcgtaaatgagaatgctaaagacaattatatagtccctaatctaaccaatgggagtacatattactttcaaataatagcaatatttaatggggttgaaactgtaatttctaatgaggcagttgtcaaactgcctggaaaaaatgaaccatctgagccaccagtgcattcaagcacacgagcaattctcgtagttgtgatgactaccggcttagaaaaagagttcgatctgagtatgcaagaagttaacagctttatcgattggtacgaagcaaaacaaactggaagcggaaaagcatcttatgcaattaacaagcatgaaaataacaaaggaccgttcaagagccgtaaggactatatcctatttgatcgtgtcctgacgtttgaagttagcgaatactaagcagtcaatacaaaaggctccgcaactcaatgcggagctttttttgcattatctcagacaataaattgatcaaacacgggtatacgcagcaaaccggatctggtccattttcgcatttttaccctagcttgtatccgtggttccaggtaaacgtgatttgtgtcctctccagtcacaagctgctggcacactccgcggaaagcctgcttatgttttggacttggaccatgctcaatgatccctaccgggcgcatccttccagttggatctggaacagcagcaagccacccgaattcggattttttgtatcccgtaatgtacacgtcagcgtatgaccagttaataaccttcaaccaatccttggagcgcctgctaacgtactggctgtctttgcgcttgccaaccacaccttccatatccatagtctctatctgagtgtataactcttctccagcgccttctatatgtggaacgatgccaaaggagggagagggcaagatttatactgtgtagaatagctttacgctccagtagaggtagtttgcgcaagtcctgacctttgtactgcagaatatcaaatatcgcaaacgtggccggaagcttccgagtgagttgttgtattttactatcctgtttagtgctgaagcgactcatgactgcttcgaaatcgttcaatcccgttatcatatcggcgcatactacttcaccatccaaaatgatgtcggagccaaacagcaactgaaattccgggtactgacgagtacagtcattattgtgacgtgtatataaccggacattgccggaccgttgcgaatatatcaaccgatgtccatcaaccttaggttcaaaaatgaaatccgagtgactgaatggacccggtgttgtttcaagtaacataggacttatgaacataaaaacacctcaacctaattatagcggtttgctacaaaggattgaggcggtaagttatggagaatatcatttgtgtcgatcagttcatataagtgcgctcaaaccattcaacggactcagttaaactcgcaattcctaatatgaaaagacctaaaccaaaaaggaaacagataaatattgaatcacctaattcattcattttaccgtaatgttcaccacagtacggacaaataatagcagtgtttgaaatcgagcgtctacatgttttacagggtgtcattgccggagaatttataccttttaattttctataaatattgataaaacttttgataataaacattaaagatagcacaaaaataaacaacgttaatgcacccaaacaaaaaacaccaaagtagtcactaatttcgttaagtttttcactcaaaaaaaaaaatccccttactcaaataaattctactaatgtaccgtctggatattcctccaactgattacctacccagctgtcggcaccactattatccgatggacttatgtattcgatatcttcaccttcaccaccctcggcgcacatttccataggcaactcgtcacgatcctatcatttcttagagtcaatacctcttaaatggcagattacggttttggtcttataattataacacgcctttatacgaataatcggacagattcggggttctgtttacttctattaacaaattgtttggagaagcttcagaactccgtggagttgttaggatgagtatgtaatatgtgtaccgactaggaataaaattatataaaatggtgttagctattattactctctcccatgagtgctactataaatgtacctagtctgtgtgactgggtgtttttgttgttgatctcatataatattcatgaggtgatttacatgctaacggattatcaacgaaaggtcctccggatcttatataactacaaaggtggacgcgtaggtttcctactatccacgaacttacagtcataacgggtaagcataagccagacgttatggcttctttggatgctcttgtggctgcggaatacatacattgggaagataggtctgacacggctaacatagtgatcttggaaggctgggaacgtaagggagaacgtcctaaggtagaacacgcaccaccgtctggaaacatcgactattggactcaatactaaagaggcttgtcatgcgtagcagactgaaggataacggggtgtatgagacatccatgattattatgcctgaacacagagaggcttggttggctcagtgtgaacaacagaagagacgcggtaagacggaactggacgatcaggagatgcaacggatcagtgaagtacttgttgactcttataatagaagtagtacggttgatttgatattatttaaccctttcttcgaagagccgctctcaggagtagttgtgggattaaactctgcacggtatgaaataaagatgatgttggaggatgagttccgctgggtttctttagccgaaattgtctctgttaattaatgagattgtatcgctttagaattgcgagcctatactttataatatctgtataagcatattattttaattaggagatttttgatttaaccagcgtcatatgtcagagtagtaatgcaatcaaaaacgagtttcttcattataataagaaaaaaagggcgcccacaaaatgcccacaaaagtctgaatgattatgattagttttgaaaagctgatcactgataatacttgtttaagcgggtttcatttgttgaatgatacactttgaaagcatggaacataaaccgtacacaagtccaccaatgggaacgcgatcaatatatcacttcgtactaattgaaaaaaaccttgtaactacggggttttgaaggaatgagccgggggacgttttgagggaattgcacttctattgaggttgcgtcccctaaacgtccctcggtttttgattttctgatccaaaaatacgggaagtgtactcttcatatttatcaatgttacgcttctctagctttttagaaatatgagcatacacatcggatgtaatttgcacactgccatgcccaagctgctcttgtacaaattttatgtcggccccagcttcaagcatgatcacggcataggtatgtctgaaggaatggatcgttaaatcctcacttaaacccgcttttctcaaaattctcttcgaagcattaaataaactagatttaggcatcggactaccatcattcctgcacaagacgagatttaaatcgtgtctgtacatggactcccctaaattgatcttattttgattctgccatgaagcatggtacctcaaatcatttatgattccgttacttacactaatggtgcgggtagaatttccggtttttgtttctccgaaaagttcatcctcgtctgcggcttgaaaatcgagtgtttcatccacgcggatcgtcttttctttgaaattgatatccgaccacctgagagcggcaacttcaccttttcgtaaacccgtttcaataagcaatttgaagaaaatccaataaatgtacccataccctcgggccgtgtgaaggaatttgggaatgtcttctgaatcaattacatggattgcgtaatatttttccttgaatcagtgcatgttccatggctgagtatacagtagagttgatgatctcgaccgtacgtttgctgagtccctttttaaacagagagtccaaaaagacctgatacatatctggttttaaatctttgagcatcagacgcttaaaataaggtttaatatgggtgtttaagttgttttcatgtagtttgattgtattctttcgtacaactccttttttgtagttatttatccaatttcgaatgtaatctaccaaaggaatgtcggattgttcgaacccttgtttgagctgccttaaaaattcagcagcagccagttcagcctctggtttagttcgaaaaccagcctcagatttctctttttgttgttgagtgaacggatcggtgtattttaaccgatacctccagccactttttaatttcttgaaacttgccaatttgattcctactaatagaaacgttagttccttttttgtgtatgtaaaaccgcctcacggcgatgtaagcgtaagttaaacaaattattaaacagagcagtaaaatgttgttgttgaaagatgtaagaagaaaaagctttgaattagaattggaaagatattttacaatgatgcatcaaaaaacgagccttcggtaactaaggctcatttgtgcaggagtcatatttggctccaataactatgtttaaattagtgcagaggtttcttgcagaaaagtaactaaaacaattctaccctatttcacaggatttgatcatactttagctttaaagttcttgtccttggttcgagaccagaacttgtaccgattgccgaaaaggaaatgatctgattaccgattagataagtatttaactacttgtcgctgctctaattcattaagctggcgggcagtttagtttaagattaactgaggtgaaccatatcatcgctagtgataaagcagagaattgaactggatatcgcatcggcaacgctgagtttgcaggaaggagcttaaagtattcacgtactcgatacatgcggaatgtctaatattgatggtccgtaaggaatagatgagatgtgacagtttagctcaaacgacttaattgtatagtgttgacacttcgcccacttggagtaatatgttactattgagatagcattctatttccgatgaagatagtttgaatgttatttatgaaggagagacactatgacaatgttcgagatatgttctatgcaaagtctattttatgaacaacggcggttgtttgtatagagctaataatataagtaaccgcttaaatccggatagataattgttatagtgtagactttgctaccttaaaattcaactattttaaggagcggctatcatgagatatgtaaatgccgacatcatctttccggaagaattactaaatgaaatacaaaagtatatgaacggtggattggtttacgtccctaaatcaaaaggtttgcgttaaaaatcggggtgaaaattcaggcagcagaaaaattataatcttagaaatgatgaaatccggcgaaagtttctcgatggtgacactatcgagaaactttcagatcgatttttcctttcaagcgatactattaaaaagatcgtttatacaaaataatagcttaaccaaagtcgcattggaagaaatcctaatgtgacttttttgtgtatagtatagtttaaattgtttattacatattttcaagcttttactatcgttataataacatataagagaagtagttgatttacttcataaaataaaaactgcagggggataacaaatgaatgatttttttagatttgatactgatgaagaacggcgggcgttattaatcagagcaaggaaagtcgctttatctgcaattcaaaagtataacttagaatgggataacatccagtttattcaactatccgatacgatcacgtataaaattgaaaccagtacagataacaattatttacttcgcattcattcggaccgattaagcagagaggaaattcgttcggagctgctactgttacaagccctgaacaaatcgaaagatctaaatgtaccagaagggatggcaaattgtgatggtatttatgtattggacatcgaaacagagacaggatataggcgcccttatataacgatgatgcgatggatagagggtgaaaaagcagcaggtgaatttacagatagtcaagcatataatatgggtgtattgatgagcaggctccatgaagcagcaaaggatttcaatccaccttctgattttgtaagacctacttggggcgtagaaagttttaaacgtgaaatggctaagttggaacgttactatgagcgttttttatccgaagagggatggaagctgtatcaagatgcagctgagaaggttgtatcccaacttaccactatgcttccaagtgaacataactatgggctcattcatgctgatttacataccggtaatatggtttttagagataatcaaccctatccgattgattttggaagatgtgggtacggatattatctctatgatatggcaggtaccatattggagctttggccaaagcatcgatggatgcttatccaaggttatgagagcatgaggaagttggaaaaggactatattcgcgatctggaatgtttttttgtcatgttcatgatcgagaacacctgccatcactcctctgatccaagagaaacaaccagtttaatcgatgaacaaaagtatgcccaagcatacataagagaatatttaaatggtaatccatttttattcgaagtgatcgagcctgtaaatgtggattaatactaaccgataccgggctaaaataatgatatcttatggtgatgatttacaataggtcgctgtttagagtgtttgttcgtatcatcaagttttaaaaacgtgagctatgacttcgagtttatataagatctacttgtgtacttagcgctgaaacttttctgtttattatgaagatttatgcttattcatgaagtttgtccgatccagttgttcttcagcttctctagttccccttcattttcggggtgtattttgacggagctgtttgggtcgtttcgtgattttttaaactggcattgagccatcattattacaaatatcatgattataccggttttattgataccgcttcgacaatccagacttgccaaccttttggttgtgggccagtgaacgaatattaaatctatttatgtcggatagaaaatatcccattaaagtcgctattatagcggctttttttgttttagtgtgcccagatacacgtatgatcttgttggtgaaagtccgaccaaggagcaatggtagccaggatgcttgcatatggcgaagtctgtgtgtaagagcacatcgacaatagtacccgtcagagacaggacgagcaacaattcaggccgcaacatgaagaaatcctgccacgttatccaaaaggcctcgcaagggaggaaagaggctgacgagtattgtgaaactggacgaaggctaagaaagctatgcagaacttggagcagcagtggataacaattcggcgtaatggggaacagaatggaatgaaaaatcctgcagtgatcatggcagaccctccttcacacagtttttttaggaatccgtaaagagacaatctataattccaaaaagacgaattgaaacgtctgaggtagggagtccgaggtgctcataacaaccaagaaaatgattaaacaacttgaaaagctagttcatgcggcaaaggagaacaacaagcacaaatggcatgtcatgtatgataaattcttccacgggggtgtgctgtacgaggcgtgtaaacgagtgaaagcgtatagggtggcagaagtcgtggatacagtgaccgctgacagagattggggaacaaggagaacggaacttcctcaaggacttcgagcgagagttgaaagaaatgtaaccaccatccgcagcctgtacggtggcactatttccaaaccggcggatatgcgggtaagaacattttaggaacatgtagcgtggctcgatccaaagattcagggaaggagaaactattaatatataaacttcagtcagtagaagttagctagactgtactggtaaattctgcaacgattaaatcggtttgtatatataaagaatagacaacccagaagctggatgcgatcacaggtcgaggtgaagtatattgccaggcaatatggattaaaaacgttactgtaatctgcatgcgcatgaatgacgaacatcggaaacccgtaaagggaaaatctaacatacggtttgttgaggaggagctggatcttgcccagccttttattctagcctagactatgtgagtacctttcgcatagttcctattgataggctaaatagaaggattaagcttgtcagaggtgaagaggattatagttggatcaagcttgaagagatcgcttaggcaagtttataattgatcgagcccaagcgattatcccagggactcagttttttcttctacatatatgttccaaataagcaatttctattttgaataaagccgtatgcttgattcatataggattagggggacgtcccccaacttatgaaaacttatgatcaattttgaccgtgtgtttctgtatttattcctataaagcccgttttcattgagatatacaatcatatgaagttaacgtacataaaccgcacacaagtccaccaatgggaacgcgatcaatatattacgttgtactaatcgaaaaaaccttgtaactacggggttttgaaggaatgaaccgggggacgttttgagggaattgcacttctattgaggttgcgtcccccaaacgtcccccggtttttgattttctgatccaacaatgttggcggtatactgttcataacaatcaatattgcgttgctctaacttttgtagatgtgagcatatatatcagaggtgatctgcacacttccatgaccaagctgttcttgaacaaagtttatgcttgcaacggcctaagcatgggtacagcataggtgtgtggaagagaatggatgcgtagataatcactcaattctgcacgccgatctgaatgtttttgtgtttccaaatagttcttcattttctgcttggaaattaagtctatcatcaataatgatcctcttttctttaaagttaatgtcataccattttaaagatgcagcttcatcttttctcatacgagtttctagaagaattttgaagaatatccagtaaacatatccctaacccctcgcagcttgaagtcaatcagctataactttagactcaatgaaattaactgatttctttctcagtctcctttaatgatagaccccttgcaatggattccactctaactttccttgaattactgcatgttctattgccgaatagacggttgagttaatgatctcagtagttctctgcttaagcctaagcctctgagaagtttgagaaatccactggattaaaaacagctacagaaaaagcagatcagacatctatcagcagctggtaccgcgtagtcgtcggtattatacaaactgatataacggctaacctgaccgttgagacatgcgaaatttgtgcactgcattggccctgtatcttgaatccaatagtggaagaatgttgcttgtcgccatggatcggaagattgttgaattcctccattggtgaagaacagtcagaaatttactcagattctaaattcaattggactctgagtttctgaggtaaatgaggattttcaaaatcgatcacaaatattagaagaatttgatgaagacaaatataacgtactttgaaactccgggttgctcaccgaagtttagacttcttatggcatatggaacggcaagagctttgtcatcatcaacatctcattgcggaaaatgaagagattgcccaagccatgaccaagcatatcgaggaggcaggtatgcactagatatggaagatgtggagaaacgggctaccgaggatgtcgttgcccagtgtgaggaagttttggtcaagcttttgccgagatgaagcgcagcaagcgtaccctggtcaattcgacatgagtatttaagcttagagaattacccagttacgttccagcgtttggatggtagatggtgccatcttctcatgcttaactaaaaataaaacagtaagaaaccgcatcaaaagcatggcggtttctggatgactgatggctaaattggtagataaaatttaacaggcagtttcaaatgactttgcttaagtaaatttatttctgagcaactttgagatttttgttattaagctcattagcttgcatttacagttatgaggtattttacgtaatcaccattaggattaaaagaatatacaacagccgttccaagggaactattagatgaaaccactcccccattgcttattgaaataaggtgtgcgccagactggatttgaacattttgattggtagcgaataattttacatttgaattcctgagcatgttgaaattaacagttgcgataagttccccttgaagtacaactgaagaattagttgttacttctttagcaaaggcctgtgaagatagtgaaggaatagaaaaaatcgagagtgaaagtgttaataaaatcaagaaatttcttacatttttcataaacatacctcctaagaattagtatgaggttagtatatcatggaaaaagtttggtaaacaactaattttttacttataaagcgataattataaaataaaagacgtttccctgactagttttaaaaaatattttccccctcactctacaagaattttctagacaatttcccaacttacctatttagaaaaactcgacgaacacatctcatcgcacaaagagaagttttatggagtatgcttggatactattagttactgcgttattgtataaattaatttgatgattatgggattctatatgggacactgatttttacaatcggtgtcctaagggattctttttctctaaagggatgatctcaaaacacaaaatagagcagcgaggtctaaaactaaatagcctcattgttcttttttgtttttgctaggaaatgaatcgtcctccatagggaacgcgatcgatatatcaggttgtacttatagctcaatttcttggcgccctagccctaaggggctttttgtgcgtaaaagcagataaaatcaaaaataaagtaattgcctaaatctttaaatgtcccagatcattctttattagtccatataatatatctatgttttatctgtaataatcgtaatattcctcttcattagttatctgaaagccatgaaacaaaatgtgatatctaactccactaactttcaaatcaatgtttcatttgtatgttgaaagtttcatatagaagaggtatactttaattaaattttgagcaatttaattttaaataattaattggagatgttaatatggatcaggcaaaacaacttgtgacagaacaacgtacatttttttatacaggacaaactaaaaatatcgagtatcggattaatgcgcttcagcagcttagaaaaggaattgaaaagtatcagcaacggattcaagatgcacttcgggcagatttgaacaaatcagaggcggaagcttacggttccgagattcgcattgttctgggtgaactggattttgcattagaacacctgcaggaatgggctgtaccaaaacaagtcccaaccaattcggctatgccggatggggcgagcaccatttaccctgaaccatacggggtggctcttataattgcaccttggaactatcctttccaactggcctttggtccactgattggagcaattgcagctggtaactgtgcagttatcaagccttctgaattaacaccagccgtatctcgtctgacatatgatctgattcaggagatcttccctcaggagtatattgcggttatggaaggagaagttgaggctagtacagcattgttgaaagagaagtttgattatattttcttcacaggaagcacaggtgttggtcgcattgttatgaaggcagctgcggagcatttgactcctgtaaccctagagctagggggcaagagccctgctattgtccataatgatgcagatctgaagctggtggcacagcgtattgttcgtggtaagttcctgaatgctgggcaaacttgcgttgctccggattacttgcttgtgcatgaacaagtacatgatgaactgatcgatatgattggcgaagagatcaaagataaatttggggatgatgtgttacagaacgctgatttcccgcatattgttaactcgcgtaactttgatcggttgttgaaattcctcacagatggcaaaacgctgattggtggacggtctatacgtgagcagttgctcattgagccgacggtaattggagatgtgaactgggaatcagctgtcatgcaagaagagatcttcggtccgattcttcctgtatttacgtacagtgacctgaaccctatgctggatgagattgttcgccggccaaaaccattggcgctatatctcttcacacaggatgagcaactgcaggatcaggttctggatcaagtatccttcggtggcggatgtattaatgatacactttctcatatgacttcacactatctcccgtttggtggtgtaggagagagcggtatgggctcatatcacggacaacagagctttgatgtgttctcgcatcacaagagtgttctgaaacgcagtcaataattagccgctaaaataacataaacaagaaaaaaagaggttgtcctgttgatcaggacaacctctttcgtatttcattacatctagttttgttactcaagttaaatattaatgaatatctcggaaaaggccaatgactttacccagaatactaacgtgtttcaaacgtaaaggttcgaaggtcgcattctccggttgaaggcgaatatgatctttctctttatagaacgttttcactgtagcttcatcgtcttcagtcattgcaacgacgatatcaccgttatcagcagtttgctgttgacggacaataacgtaatctccgttaacgattccagcttccaccatactatctccgactaccgaaagcataaacactttctgttcgcctacataatgtgtaggaagagggaagtagtcttcaatgttctcggttgcagtgattggaaccccggctgtaaccttaccaacgacaggaatacgtgcaacgctatgagcaaattgatgagaatgctcagattcttcctggctcaaaagctcaatggctcttggcttggtagggtcgcgtcggatcaaaccttttttctccaaacgatccaaatgtccatgtactgttgagctggaagctagtccaacagcttcaccaatttcccgtacggaaggaggataccccttcaaccggacttcatttcgtataaactccagaatagcctgctgcctgctggatatcttcgacataccgtatcaaccccattttagtaacgtttgggaaaattataacatagaacctccgttcgtacaaacataagttctaaataaaatagcattaaatcagtgttttttaacttatagaacagaatttgtccaaaagtcagagcataatactgcaaatgctttgcaaaaggacatcaattcagatacctctgtttcaaaaaaaaagcgaacaattgttctaaaaatctattgaacaaaacaagtgttcgtgttatattgatttcaatagataggaacaaacgtttggaggcgggtatttaatgagatattctacttatcaaagcatttatgaaccaatcaattcggaactggtgaagtctaacatagggaactacaagaaggttttagcgcgtttcaagatttcttcatggatgttaaaggtagccattacctctatgattatatttattggatgcagcaccgttttaactgtttttgccggcaatgagaatgatgttctgcctggaggaaagatagctgtttcacaaggggaaacattatggagtatttctttggaacataaaccgacgaatatggatacacgtatttatatagaagcaattaagaaagtgaatcaacttcatacaacttccatccaagtgggacaagtactagctctaccgcaatttgcagaataaaatgcacatcaatgagtgttagcgcgtgtcagcttgacaagcagcctttataatggcaaagttaatatgactttgtatttttggaggggacaagcttggatatagatagtctggtagcacgtattaacgaattggctcgtaagcaaaagtccactggattgtcggaggaagaacttgttgaacgtgccgagctaagagagatttatttgagcaatattcgcagtaatttcagacaacaactggataccattgagattgttgatgatgagaatgacaaaggccaccaaggcaaactcaaacactaacgaaacctaatgatatcattatgatatttaggtttcttcctgttattttgagtgtgcaatttatagggggaaatattggtttacagttatgtaagccgatacaaagacacataagggggattctcatgtcgcgttcgttcgagagaacggttaagaaaaattccaagcagttaaatcagcaacgcaaaaaaagtggtcaaccaatcacaggtacaccaggtgaagaagtctttaagggacgcagcctgttgttccctatatttttgatcggtctcgcctttttgtacctgtttatgagcacgttccttgtgcaagctccgatgacaacctgggactgggtgacgatgctgctttacgtatttttggcagtcatcttcatgcttcgccgtccatacatcaagattagcagtaatcggattataacgacgaagggtaatcgtgaacgttcaatcggggttgacgatattgtcaaaatcagaattgaaccaggtacagttgttatcgaacataacagtcgcgggaaaagatgggtgttcaccaagttattgaaccgttacgatacagatgcgattgcagaacgtttgctgaagtttgcaaaagcacaccagatcaccgtggaaaccgtcgaaaagtaattattgcataaaggggtagatgatcggaatggcgttaaaagcgattttgttcgacctagatgatactttattgtgggatgagcgtagtgttcgagaagcttttcatgagacttgtctaatcgcagcgcaagagactggggtcaaaccagaagaacttgaagaagctgttcgtaatgaggcacgtgggctgtatgaatcatatgaaacctttccttttaccaaaatgattggaatcaatccgtttgaaggcctttgggctaactttactggtggggatcaacctgagttccgtcagttggaacaacttgctccagtttaccgtaaagaatcatggcgtcgtggcttgttgaagttgagtatagatcgggaagatcttgctgaacaactggccgcacagtttggagtagaacggagatccagacctcatgtatacgaagaaacgatggataccttgcgtcagttacaaggaaagtacaaactgttgttgttaacaaacggttgtcctgctttgcaacaagagaagttggatggtgtacctgaattgactcctttctttgatgagattattatctcgggtaacttcggaaaaggaaaaccagatccgtcgatatttgaacatgctttgagtaaactgggtgttaaacccgaagagagcatgatggttggagacaagttaacgactgatattcgtggtgctttatcatctggcatccaatctgtatggattaaccgtgagcataagaccaacaatgaagagtatgcgccagaccatgaaataacacatttatcggaattaaatcagcttattgctaagttctaagcggaatcagttataacatctttcctcagcaccctgaaacattggaagcttcaatgaacgatgatgtcgttctagaagttaccaatgtttttttatttgagcttgttgagtaaattaccttgttaaaagagatctccattttttttactaaaagttattgatattagggggaagctggattagaatataactaacatactagtatgactagtatttagattgtcataaagcaatttctttttgacttacttcattaaatggaagcagggagttattgcttattattttcgattgattgtaagcgcttaatattttgaaaaagcttgttttgatttggagatcacaccacttagtaagtgctaatgaatgatgtgaagcaccttggattgtgtgattctacataaccctcaaattgatatcgcttacattcagcaattatctatttcgtagtgggggtgaagttaaaggagttgttgtcttctacaagaggagaaacgatggagattgtacatgaattactcttacttatcaagtcctggatcggagtgaaaacacatggagtcggaaaccgctaaaacaacgttaaccatgacatctttacgtaaagagagcagattacgaacggcagcaaccttgtttcgcaaagactggcagctgtattcactattaatccttcccatcatttatctccttattttcaaatatggaccgatgattggtaatgtgattgcgttcagacgttttgttcccgggggaagtatatttggagaaacttgggttggattaaggtacttcaaaatgttcattgaggaccctaccttctggagagtattcggtaatacgctgatgttaggcggacttgcgttactctttacattcccggttccaatcatttttgccttgatgcttaacgaagtgaaaagtaaacgattcaagaagtttgtacagaccgcgtcatatctgcctcattttctgtctatcgttatcgttgcgggtatgatcctgcagctgacagcagtgaatggttccattaatggactggtggctttcttcaccggagacaatattccttttatgcagcgggctgagtggttcagaacaatctatatcacttccgaggtatggcagggtatgggttggggagcgattctgtatctggctgcactgacaaccattgatgattctttgtatgaagctgcgcgtatcgatggcgccaatcggtggaagcaaacgattcatgtaacgttaccagggatcttgccaacgattgtgacgttattgattttgaacatgggtaatttcctagcagttggatttgaaaaaatcttactcttgtacaatccgcttatctacgagacatctgatgtgatctccacttacctgtatcgggttggactggaatccagtaacttcagttatgctaccgcaattggcttgttcgaatcgctgatcggtctgattctggtgttctccgtaaatgccatttcacgcagactgacacaaagaagcttatggtaaaggaggagcatcatgcaggaatccagatcttacaaggtatttaaagtattcaatgtcatctttctgctgttcgtggtatttataacgctctatccattcttaaatgtcgtggcacaatccttcagtagtgagtcctatattaattcgggtaaggttagtttgttcccaagaggattcaatgtggagacatacaagaccatctcacgtgacagcatgttctggacgaattataaaaatacaattatctacactgtagtaggtacgttaatatccatgtttatgacgactattttcgcatatgccctgtccaaaaagaggttgatgggtcgcaagtttcttacgatgttcgccgtattcacgatgttcttcagtggtggattgattccaaactatgtgttgattaattcccttgggttcaacaacaccatgtgggcacttgttgttcctggcgcaattagcatatacaacatgctgatcatgaagtcattttttgaaaatatgcctgaagaactggaggaagctgcctccattgacggtttgaacacctacggaatcttgttacgcattatattgccgcttagtaaagcagttatggcaaccatggtgctgttctacgcagtaggtcattggaattcctggttcccagcctttctgtatctggacaaaaaagaactgttcccggtcaccatttatttgcgcaatatgattgcaggagcgacaagtggggcatctgccggtgcaacctcagctgataacctgacacagattgctgccaatattaagtcagtaacgatggtattaaccatcttgccgatactcaccatctatccatttgtccaaagatactttgtaaccggtatcatgttagggtctgttaaacagtaatacgcagcagctatataaattgaactaaagatgatttacacggaacactccgatgataaaggcgagcgcttcgctttttattgattaaaaagttttaaggcaagatcaacctaaaccaaattcagggggataacctaaatgaatcaaaagccacgtaagtttgttggtaaaatggtgttggcaacaatgatgagcgttgttctggcagcatgtagcagcggtactggagctggaggtgacgtcacggaagttcagaccaaggcagcgatggagacgtacaatgtaggtgacacattcaaggcaactgagccgtttaatctatccatactatacagtgatcatcctatttatccttttaaaaaagactggttacttttcgataaaattaccgaactgacgggtgttacgcttgagccaacgattgttcccatgagtgactactctcagaagagatcccttctaatcagttcaggcgatgcaccgctgattattcccaaaacctatcctggtgaagaatctgcatttgtatcttccggtgcggtcttgcccattagtgattacattgatttgatgccgaacttcaaggataaagtggaaaaatggggtttggaagatgaactggaaggacttcggcaagaagatggaaagtactatgtgctcccgggtctgcatgaagaagtatggccggattatacattactggtaagaacggatgtttttgaagaaaataacatcgccatcccgacgacatgggacgaattgtatgatgcagccaaaaagctgaaagaaatctacccggattccattccattttcggatggatttaaattcaatagtacattgagcatcgctgctaccggctttggtaccaaggctggatggggttttggtaacggattgacgtataaggaagatcaggatggatttgtgtacacggctactacgccggagtataaggaaatgctaacgtactttaacaagttggtatccgaaggattgctggacaaagaaagtttcacacaggatgatgatcaggctgtacagaaatttgtatccggcaaatcattcatgattaatggtaattcccaaacggtggtgctgcaccgaaatgatatgaacaaaacgctgggagaaggtaaatactctgttgcaaagattacagttcctggtgggccaaaagggcaattaatgtctggctccagacttgaaaacggtgtcatgatatccggaaaaattcaaaaaagcgaaaacttcaaagctattatgcaatttgtggattggttatactacagtgatgagggtcaagagtttgccaaatggggcgttgaaggcgaaacatttaccaaagagggcggaaaacgtaaattggtagaagatgtgaactacaatggcttgaatcctaaaggcacgaaggatctgcgtattgactttggtttctctggaggagtatttgcctacggtggtacgacagatctgctgcaatcgatgtttagtgaagaagagttgaaattccaacaagacatgaaggataccaaggaagtgatcccggcagaaccaccaattccttactcttcagaggaccgtgaacgggtgacacttctgagtacaccattgaaagattattcggatcagaatacacttaaatttatcttgggtgaacgggacttgtctgaattcgatacatttgccaaagagctggagagtcaaggattatccaattatctgaagctggcaaatgatacgtacaaagcctataaagaaaacaagcaataatatagttgatgttggccagattaccgtttcacaccgatatataagtggaacggtaatttgtgctaagatgaatgaatacggctgatagaaagaggtctaggcatgtcacttaatcaaaaaattagaggctcgacccgggcatattcatataacatgttaaaagaacgaattcttcatctggaacttaagccgggtaccaagatttcagagaaagagattgcagatgaactgcaggtgagcagaacacctgtgagagaagcatttatgaagcttgctgaagaagaactgctggacatcattccccagagtggaacgatcgtctctcatattaatctggagcatgtggaagaaggcaggtttatgcgggagaagatggagaaggaaatcgtgactttagcttgtgtttcttttcctgaagagttcagatttcgacttgaaaccaacattgcaatgcaggaagtctgtatagggaaaaacaatttctatcgtctatttgaactggatgaagagtttcatcagattttgttccagggtacgggtaagttgagaacatggaaaatgttgcaacagctgaatatcccgtttaatcggttgcgtttattacgtctagcggaggactccaacctggaggtcattatctcccagcacaaagagatttatcgtcttatcacagcgcgtcagaccgagcaagctgttcaagtgatggaagctcatcttagactagttgttattgaacaggagtcgattaaggcgaaatacccgcattattttatataatgcaccgatgttgtataatactctctatatgcatatgcgaaaacccctgttcaattgaacaggggttttggttaagcaagttgtaacacgagagtgttaggcttgtttgataaaagtaggatcagggtatggatctgcaatccagccatctttttcgatgaacagacgtacagcaattatttgtttgttctccattaaagtgaagaagtgcggtgtattctcaggaacagagatgacgtctccaggagacagttctacattaaagtagcccacatcatctgtagctttgataacaaagattcctttaccagcgacaattgcacggatctcatcttcagcgtgggtgtggatctcttcgaacttggccagcttttcttcgatatctggtgtttgttcggacagcgtgatgacatcccagatctggtatccgcgacgtgcagccaaatctctgatttcataatcgtaagtttccaaaacttcggttttctgttcatccgttaatccaaagttatcttgcagatcagtgttcagttttgatgcgtcccacttctcatataatacatcgtatttgtttaagaaatttcgaacattttcgtcaccagtgatgcgttcgttcgtatttcggataacaatttcagccatgttctttccctcttttccacttggtttaattgaattatatcggattgctttgtttttgtcgattctcaaattccgttcatattcgtgcaaacccgccatctttcgggaccaaacccgatctttcacattaagttagtttctgttaaactaagatctaacgttttgcgggggtgaagatattggataagattagtctacacgatgcattaaaacaacgaatattaatcctcgacggtgcaatggggaccatgattcaacaagttgatctgactggcgaagattttggcggcgaagatctggatggatgtaatgaaatgttagtgcttactcgtccagagctgatccagcgcattcatgaagaatatctggaggctggcgccgatttaattgaaaccaatacatttggtgccacatccgttgtgcttgctgagtacgatattcaggatcgggcacgcgagatcaacctggaagcagccagaattgcgaaagctgcggttgatcgtttctctacacctgaatctccacgttatgtggtaggtgcgatgggaccaacaaccaaaacactgtctgtaactgggggcgtaacgttccaggaacttatcgacagttatttggagcaagcgcttgctttaatagagggaggcgttgatgcgctactactcgaaacctcacaggataccctcaatgtaaaagcaggcagcattggaattcagcaggccttcgaacagagtggcgttacactgcccctgatgatatcaggaaccatagaaccgatgggaacgacccttgcaggtcagaatatcgaatccttttatatatccttagaacaccttaacccaatttcggtaggcctaaactgtgctacgggtccagagttcatgcgtgatcacattcgctcactttccgctatggcatcggttgccgttagttgttacccgaacgcgggtcttccggatgagaatggtaattaccatgagtcaccagactcgcttgctcagaagattggtgcttttgccgaacagggctggttaaatatcgctggtggatgttgtgggacaacccctgcacatattcgggcgatgcgcgacacacttgcccagtaccccccaagagaaatgaacggaacacatccaccggcattgtctggtatagagccaatttatattgaacaggacaatcgtccatacatggttggtgagcgtacgaatgtgctaggatcacggaaattcaaacgactcatcgtagaaggcaaatatgaagaagcttcggaaattgcccgtgctcaagtgaaaaatggagcgcacattgtcgatgtgtgtgtacaagacccggaccgcgaagagtctgaagacatggtgaagttccttgaattggttgtgaaaaaagtaaaagtaccactcatgattgatacgacagatgcttccgtaattgatctggccctccagtactgtcaaggtaaagcgataattaactccattaaccttgaggatggcgaagagaaatttgagctgattacgccgttgcttcataaatatggtggtgcagtagttgttggaacgattgacgaacggggtcaggcgattagtcgagaagacaagcttgacgtagccaagcgctcttacgatctgctggtgaacaaatatggtctcaaaccagaagacctcattttcgatacgttggtgttcccggtaggtacgggagatgaacagtacattggttcagccaaagaaaccattgaaggtataagagtgattaaggaagcgatgcctgaatgtcatacgatactcgggatcagcaatatttcattcggactgccagaagcaggccgtgaagtgctcaactctgtatttttgtatgaatgtaccaaagcaggtctcgattatgccatcgtaaacacagagaaactggagcgctatgcatccattccggaagaagaacgcaggctctccgaagagcttttatataatacgaatgatgcaacactggcggcgttcgtagcggcgttccgtaacaagaaggttgagaagaaggaaaaaatctcgaacctttcattagaagagcgtctcgcttcatatgtagtcgaaggaagtaaagaaggattgctgccagatctcgaacaggcacttgccaaatatacagcacttcaagtgattaacggtccactgatgcgggggatggaggaagtaggtcgtctctttaacaacaatgagttaattgtagctgaggtgttgcagagtgcggaggttatgaaggcttctgtagcatatctggagcaatttatggagaagaatgaaacttcggttaaaggtaagatcattctcgccacggttaagggcgatgtgcatgacatcgggaagaacctggttgagatcatcctgtccaataacggttaccggatcattaatttgggtataaaagtaccaccagaacgtatcattgaggcataccgagaagaaaaagtcgatgcgatcggtctctcgggtctattggtaaaatcagcgcagcagatgattcttaccgctcaggatttgcgaatagcaggtatcgatgtgcctattatggttggcggcgcggcgctaacacgtaaattcacaaaaaatcgtatccgtcctgaatacaacggaatggttgtatatgcgaaagatgcgatggatggtctggatctggcgaacaaattgatgaatcccgtttcacgtgaagtgatgcaactggagatggaagcagaaaaagatgctgatgcttcaggtgctgtagctgttcaggctcttccagagcttacccgggtagaacgttcggatatcgctgtagatcatccggttcttgtcccgcctgatctggagcggcatacgatgcgtaactatcctttatcacatatcctgccatacgtgaacatgcagatgttgcttggacatcatctggggttgcgcggttcagtagaacaactgcttgcttcaggtgataagaaggctaccgacctgaaagcagtcgtggatgatatcatgcaagaggctgttcgtgacgggattattcaggcgcatgccatgtatcgtttcttcccggctcagtccagtggtaacagcgtcattatctatgatccaaaggacaccagtaatattttgcatacatttacgttcccacgtcaaaaagtcgagccgttcctgtgcctgtccgacttcctgaaacctgttgaatccggtcagatggattacgttggtttcatggtagtaacggccggacacggtgtgcgtgaactatccacggcgtggaaagatcaaggggattaccttcgctcgcatgctctgcaatccgtagcgcttgaagtagcagagggattagctgagcgtgtgcatcatatgatgagagatatatggggattcccggattctgcccagatgaccatgaagcaacgtcatggtgcacgctatcaaggcatcagggtatcttttggatatccggcttgtccggatctggaagaccaagggccgctgttcaagttgctgcagcctgaggatatcggtgtggaattgacggaaggtttcatgatggaacctgaagcttccgtatcagcgatggtattcagccacccgcaagctaagtattttaatgtagagaaggcataaattcagtagagtgtcaggcaaagccctccgcattgtcggaggttttttgctggcaacagaaagaggtgcgatccagaatggaactatatttcctgggaactaatgctggtgtacctacgcttcaacggaatgtaacttccattgggctacgcatgttggatgagcgcagagctttgtggttgtttgactgcggggaaggaacgcagcaccagatattaagttctccgcttaaactaagcaaattggagaaaatattcattactcacctgcatggtgatcatgtatttggacttccaggactgctttcgagcagagcctatcaaggtggcaccacaccattaaccgtgtatggtccgccaggtacggaacgaatgatcagtacaacaatggagcttagccaatcccgggtgaactatgatttgaatatcgtggaacatacgggcggcgtcctgttcgaggatgacagttttatcgtggaagctgctttgcttgaacatcggattgacagttatggataccggatcacggaaaaagatcgtccaggaagcctggacccagccaaactggcggaatacggtttgaaaccaggcccattgttcggccggctgaaacgtggagaaaccattacgctggataacggtgattcgcttcgtccagaagatgtattgggagcgccaaagcgtggtatggtgatcaccatattgggtgatacacgtccatgtgacaacgtacagccactttccatcaatgcagatgtacttgtacatgaagctacattcatgcatgatctggccgatacagcgcatgagtactatcatagtacttctaaacaagcggcagaagcggctagagcagcgaatgtaggtcaattgattatgactcacttcagctcacggtataaggatgaggatcaacttgagccacttttggaagaggcgcagtccgtatttccgaataccagacttgcaaacgaacaccagcttattcctgtcgtgcatcgcaagcaagaatcttaaccatgaatgcgaaccagtgcacggctaaacacgtcacatgaagaaccgggtaattgcacgggactgagggagaagaactcccgcggtcccttttgcaatctggtcagaaagcgtgtaggatgggcaatatgaagagggaaatgattcaaattattttccgggaaagcgcaggaaatgacaagcttgtacagaagacgcgcgagctaaaccgtcggtgttcgatccggttcgacttgttgcgtgctcatgtcagcaagccattattttttgcctgaatacataggttcgcggtcaagttcgaggtaaattgattaaggacatgaaacgttaatggactgaagaaaggaagtgctgtgtgtgattaaggcctatctgattgacttggatggtacgctctatcatggcagacatcgtatcgaaggagctgatcagcttattcgaacactgcaagagctaggaaagccgtatttattcgtaacaaataattcttctcgtacaccacaaggtgtggcagatcatctgaacgggatgggcatacctgccgacgcgtctcaagtatgtacttctgctgtggcggctgctgaatatgttgctgaagagtccgcgggtgcaaaagtggcatgtattggagaagcaggactgctgcaagccatagaagaagcaggactacagcttacggaagatgcaccagattacgtcatacaggggattgatcgtgaattttcctatcataaactgactaaggcgctaaggtggattaatgcgggatcaaaattcatcatgaccaacccggacctgcagcttccttccgatgatgggctgacgcctggggcggggactattggagcagcaattgaagccgcgaccggagttcatcctaccgttataggcaagccatcgagtgttataatgaaatcagccattagccggctaaaccttgcgtctcatgaagtggcagtgatcggagataatatgcgaaccgatattgcagctggagtggcagcagggtgtgagacgctgttggtacttaccggtgtgacaacacgggataatatggatggacacattcaagcagcgaaggctcgacctgatcatgtgtttgaagatttgcataaattgatggagtggctgtcgcaagaggcagaccaagcttccaaaaaggggtaatgtacgatgccggaactaccggaaatggaaaattaccggaccttgctgtccgagaaaatacttgatctactgattacaggtgttgtaattaaccgcgataaaacgataaatacggagcctgatctgtttatcaatgaacttacaggtaatcgcatcatatttgttgagcgccgagcgaagcatctgattttccacttggctaatggcaaacgcctggtgctgcacctcatgttgggcggtatgattttctggggcacggaagaagaacgtcctgatcgttccacgcaagtggaaattcagtttggcgatcacattttattcttcattggactgcgcttgggttatttacatctgcttacttcgaaagaaaccgaagaggcgatgtccgatcttggacctgaacccttggatcgacggatgaatgtggaacgttttgcttccctgttgaaaggtcggcggggtacgctcaagacaacattggtaaaccagcatatcattgcagggattggcaactgttattcggatgagattgcttttgctgctggtctgagaccaagctccaaaacgcagaatatcgcggcttcacctgagctgacggagcgtttgttccattcgatgcagtcggtgttgcgtgaagcagcttctgagggcggttatatggaaatgccgctgatgcaaggggatacgaagacaggaagttttgacgagcaatgtcgcgtgtacgatcgggaaggcgagacttgtccgcgctgcgggggaacgattgaacgagtggaaattacgggcaagaaggcattcttctgtccgaaatgccagcatgaagcctaaaaccggaatcggggcacatgtcagcaccagaggtggatttcttcaggctgccaagagagcgtatgagatgggggcaacggcgtttcagtattttccgaagaacccgcgtagtctcagcctgaaaagtctggacctcaaggatgctgagcagtgcagggattggtgtgaacaggagggacttgcttcgattgcacattcaccctatcccacgaatccggcgttgggcatgacccgtggagaggcggggtttcatgctacaatagcttctattcgcaatgatcttgaaatttcgaatgcttgcggttctgttgggatggtggtccattttggacatatcaaaacaaacgatccgctggagggttatcagaacctcattcattgtctggataccgccttggagaattggaatggacattcgaaggttctgattgaaaatcaggcaggtgatcatggccctatgggcacgacaatggaagaaatgatacagattcgcaaattaagccgatatccggagcatattgctttttgttttgacacatgccatgcttttgcttcaggtttgtggtcgtcaggcaacgaagcggcgatgctcgaaaagggcaggatgctcggatattgggataatgttgctgctgtacattttaatgattccaaatatgcgtctggttcctgtaaggatagacatgcgaggatcggacagggatatatcggaaatgaatcaatgaaaaccttgttaaaggcgcctgagttccaaaatgcggttgttgtgctcgagacagaaacgggcgaagatggaacgcaccgtgatgatatagcgctcatgcgttcctggttataatggggagaggagcgattgtatgcatgtttttttggatgactatcgggcatgtccgaaaggatttgttctggcaacgaatgcagaagagtgcctgatgctgctaagagaaggtgacgtggacattttgtctctggattatgagcttggcccagattcgcccaatggcggtgaggtcgcggcatccattgtacgagaaggtttatttccgcgcgagatctatttgcatacgtccagtatgtttgggaaacgccagatgtacgagatgttatatagcaataaaccggattcggtaaccattcataatggaccaatgacgggtgaggtcatgctgcgtgttgccgcgggagaagaaagttaatgaagccaattacatccaaaatgttaatgcgcagtgtatgggaaggcatgccacaggctgtatttatatatacccctttatgtgggacatgtgcggcagcccgccgtatgttggaggtagtagagcacatgctgccagaaggtattttattcgaaatgaacattcatgacattcctgaacttgtacaacaatttaaaatttcaagcgtaccagcagtcatgctgtttgacggtcagcaagatgttccaaaaatggtttatcggatgagctctgtagagcatctgctctcggagatccggaaggcggtgctgaaatgagtataatttcgatggaacatgtctcacttagacgagaagagaatcagattttggataacgtgcatctgcgcatcgaacaaggcgaacattgggttattctgggtcggaatggttctggcaaaacaacattactggaaatgatgaacggatatatgtttccaagccaggggcgcattgaagtgctcggtaatctgtatggacaatgtgacgtcagggaagttcgtaaggaaatcggttatatcagccaaacgttgattgagaaactcacgccaaaagatccggtatgggaagtcgtcgctacaggagcgtatgcttttttgcgtttttatcagacgattcctgatgaagtaaaagcaaaggcaatgagtttgctggatgatatgggctttgccaacctggccaacaactcgctgggaatgttatcccaaggagagcgcaaaaaagtcatgcttgctcgttcattgatggctgagccaaaattgctgattatggacgagccttgtgccggactagatttatatgaacgtgagaaaatgctggctgagattgatcgtctgcgccagcgtaacattacagttgtgtatgtaacacatcatgttgaagagatcgtacctttattcacacatgtggccttgatccgcgatggacgtattgcggcagccggccccaaacatgaagttttgacacaagatacaattaagcatacgtacgatgttccggtcgatatccagtgggatgacggtcgtccgtggatacgcgtacgttctggagggtaacacaatttgagtacacaatcgtcttgggaagaaggtaacttctcccgttttatctgcacagcgaatcatggttttgccccttatgcacaggaagaattacgccgtacgtttggtgcggtgaagagcacggtactcgtaccaggagaaatattgcttgcgggtctgcctgtagcggaggaagaagttgcagataagttgtgggcagagtatccaacgtttttacgtcatattcaacctgttcagtttcaggagaatacagaagattcggagcagtctattgagaaattgattgcatttgtgttgaatcataaggaattgaacggtgcctctgtcgtgctacaggtacggaagacagaaggggccttttggcaagaaaatgcagcctcattgaagcaactgctaactgaaaagctggatgagctaggctgtgaatgggttgtacgtgatgctgaatatgtcatttctgtatttgcaacgaatgatatgttgtatgctggcatatccagacctgaacagaacctgtcagactggagcgggggagccgtacgttttcaaaaagaagatgggcagatctcgcgtgctaagttcaaattgcttgaagccgagcaaacgtttggcattgactttacttcatttcataaagcacttgatatcggcgctgcaccaggtggatggacctcgttcctgcttgaacgcgggcttgaagtaacggcggtagatccggcgaagatggacgcaacgctgctggaatcaccaaaactgactttcttgaaaaagaatgcaggggatgttcgtttccgtgaagcagaattcgatctgctcgtatgtgatatgagttggagtccgaagctgatgagccgacttgtatcggatcttctatatagcctgcaacccggaggaacagcgattgttaccgtgaagttattgcataaaaaaccgttggcaatgattaaagatgtcatcgatacgtttgagcgttcgcggatgcagattcaacgttccaagcagttgttccacaaccgggaagagattacactctatatggtcaaatattaagagatctagccttgattaaagcagcttaaggtattatgaaattgattcgattaagctcattaaattttgtgctttacaatctattcatggctgtactataatgataccaatattaaccataacaaacctgagggaaagcatcccgaagtgaacgaaaccggatatccggtctgttcttcttcggtgaagctttcccttttttgttgtgtattgaaggaggaattgatatgagacatccggccaggctggaacgcggaagcctgctgggaggtagatatcgtatcgtatccattctgggtacaggcggaatgagccatgtatacgaggcggaggatctgaagttgccgggcaagatatgggcaattaaagaaagcgtaacggctatgccatatgaaggcagtatggagacggaggccgctcttctgacatcacttcgccatccaagattgccgcaaattgttgatttttttgtcccagatgaagatgggtacacatacttggtgatggaatacatcgaagggttaacgctcagtgagtatttcaagcagtgtcgtgggaagatcccgatggagcagttaacggagctgatgcttcaattgctcgatgtgttgagttatctgcataatctgaatccacctgtaatttatagggatctgaaaccatcaaacatcatgatcacgccggaacatgaagtaagattaattgattttggcatcgccagaagttacaaaccgcaaagtgctgaagataccgttaaattgggaaccgctggttttgccgctccagaacaatatggctcgggtcagaccgatgcgcgttcagatctatatggactcggagcattgctactgtatcttatgacaagtggtgcgtatacggaatggattcagggtgtggaaagctctatccggagtgatgttccgcggacatacatccctgtggcgagaagactgttaaggtataatgccgaagagcgattccaatctgccgatgaggtgcgtaatgaactgctccgcatacccggtggaatatcgcctggtggagatgcaaccatgaccttgaatggtggaacaagggttattgccttgactggtgcttcatctggtgtaggggttacccacacggctatagctatcagtcattatctcgaaaggcaaaacttcaaagtagctgtgattgaaatgtcacctcgctctcaagcctttgcaagaatccaacaaatcgctcaagcgggtaaaccggtgccaacaggcagacagtttgcagtggatggtgtgcattattggaaacaatccgggcgagcggatattttgtctttgcttggggggagttatcagttcatcgtgatggatctcggtagtggtcaggaccagaaccggctggaagaattcctgcgtgcagatctgcccattgttataggctcaggtgccgaatggagacaggcggagattggcgcttttgttcgatcacatcatcggtatccacgagagaaatggatatattgtctgcccctggcagcaagtgaagcagttcagcgcattcgtaaagctctggatacatccagtgtatatgggctgccgttacatattgacccttttgacaaggacgcgcagatggataaagtgttttctcatattttaacgcatatgatggcacaacaacccaagaaacggtcgttcttttcacgaaggaaagtacatgagtagaagagattacgaaaggagagcctcttttgtctaaattaagaaaacaaagccgtcaactgatctatgccggacttattggagcaggagctgtagggttggtgttcggaggatatgttatttacaatgtcaaaacgatgggggaggtcaggtcagctgtagaaacccgttatttatcggcatatgaggaaaaggaagctgaattaaagcaacaatgggattcgggagcacaaggatgggttacgattcgggatattgaagcaggtgaaccgatattaccggaggatctgaagctcattgctgttccggatgcacaagcaccgcgaaacctctggtccagtacgaagcagatggaaggccaagtggccaaaatagagttgaaaaaaggaacagccattaccaccgagatggtctatgaggatacaccggcaccgcccgatttaagaaatcgtgagctgcaagttgtattactgccgtcctcacttgttaagggagatattattgatgttcgtatccaattccctaccggacaagactatgttctcttatcgaagaaaaaagtggaacgactcaatgcagcaaccttatggattacgatgacggaggaagaaattctgtcactctcaagtgcaattgtagatgcctatttacataaagcttcaatctatgccttaacctatgtagaaccacagtttcagacacctgcaatcgcgacgtatcctgccaattcagaagtgttaaaactgctggagagtgatccaaatattgttcgacgagccgaacaggaattatccagacaggtgcgaagttcgcttgaaagttcactggccgcttccatgacagcaccgtcaaaaggggttgaacaggatgtggcacaatcctcagttacatataacagtcgtccatcatcaaataatccggcaacgtcggatggagtgatgtggaatgatggttcaggaaacggagcaggagctagttctgggagcgtaaatgatcctgctgaagctttacaaacagaacagcagagcttgctaacgggtggagaatagagcgaaatccgaggtttaatttagattaattcagataacaggaagtttaagaaaaagaaaggagttgtaacatctatgcatacatggatctttgcgggtttatgtgagaagaatgatctgatgttatatctttgcaagatattggtttcaacaggcaacaaggtcctactcgtagatggaaccttacagcagaagtatgggtacggtgtaggtgacagtcagcagtctttgcgaattacggaatttgaaggatttgatatcgcttgtcattttgtcacttcagcagctgtagagaatcatcttgaagtaaatggagagcgattggacagttatgactatgtgttatatgacatggagacctcgcattttgcttcacgtaatctctggctaaccgctgatgtaagagtctgggtgagtgattatgagcgttacaatctggaacgtggcaagggatggttgaagcggttgcttgaagaacagtcattacctggtgagctgtcatttcagcggctcttaattaacggggttgactgcaagcttgaagctcgttatctatgggcgtatctggaaggcagtccatttgtgtggacaggagaatccttagtgcttccgtgggatgagttaacagctgcggttaagcttgagaatgagcatcatcgccgagttcatcttggacctctgtcacgaaattacaaaaaatcgttgtgtcgcgtggtcgagcagttaacaggttgggaaagtgttcgcagtcgccgtgcgatgaaagaagcagagaggatgagagcatgagcaccattaccttttggagcccttttgcaggaacaggttgcacttcaagcacattaattagtgcttatgcgatggcacttcactataggacaagagtgttacttgttaatgcaggccttgccggaactggcacagaagctgctctaccatccaaagatacggattcagcgaattttatgttctcctttgaagagggtggctgggatgcgattgaacggctgcattcgagcggcagtctgaataagcacaatctcagggattataccaagccacttctgaaggaaagacttgatttcctaaccggaagaattgatgagatggaacgttccccgcaggaacatggtgagactgtgaaaaagctgctaaatgtagctaacgagtattatgatctggttcttctggatgcggatcatgctggtgttgattcacagctcaagctgcaacaggcggactatgttgtaattaatctagatcaaaatatgcgaaatctggagttgttctttgaagagatcctgccagaacgaatgaacaataagaatatacatgttgtcattaacaaatacgattcgcattcccgtgcaacgctttccaatattcggcgccagttcagatacaaaggcacgatatctgcgataccgtacacaaccggatacctggatgcaatgaatcggcgagatgtcgctagatacttgcagttggaaagtttgactgaggataaggatattcgtaaagggagttttgctgcaagcatgagcgaactcgctcgcctgattatggacggtgcaggtatgcgcacagttctgaagaggctggaaaggggagcctgaacctctaatgctctggaataccatatggataagtttgattttgattctgtgcctgacttatatctggttcaagtatagaacgtttcttcgtgaaaagaatgctcgtgttcctgaacaggaatcattcacgattgacatgttgattgagaaggtgaagaactcacttcatgagcttagtcatagtcagctcgcggatgcgggtctgcatgaagaagaatatcgtcgaagaattaatcaacgtgccgagatgagaaaagcactgaagggctgtgtctcaggcagtatcagcgacaaaacgtatgtcaaaaatctgataggggatctcctgacccgaagcatagggctgaacaaatcaaatgtagatgaagttattttgtttgcagaaccagatttgttgacgatccaggaccgattcgaaattgtattttatctgtaccgacagcaattcggtgtggatgcactctcccgaatgattgatacctacgatcttggcagactgagaatggaggaaggtacggacgatggaggaagttattatatttctgaggaggatattcagtatgtgttcgagtgcgaatatcgagagcttggattcagagaaaagacggatatcatcgtgcaacgtatctaccaacattataaaggattctcggttgttgatgagataagggaccaacgtattgacggcgttagtggtggtgttagcggtatgcttgatgctgttcataatatgggacttcgaaaaccggcatcatggaatgacttgctggatcaaggactggaggatgatgcacatgaagaaccgctcagcggcatggaaagtgtctggattttctataaaggtaagtccattcatctatcctttctgtcattcggaagcatccgtgaactgaaaagggtatgccagaatatatacaaatacaattatcccggacagttgtcggaagcaagtggatacaaagtgaatgagatgaaagacggctctcgtgtcgttgtggttcgtcctccttttgcagaatcgtgggcgttcttcgtccggaagttcgatattccgaatgcttcacttgaacagttaattacgggtaacaacgcagatctgccaattacattgcttcaatacctgatgaaaggaagccggattacagctgtaaccggtgcacagggttctggtaaaacgacgttgcttatggctatggtcaaacacatctatgcatcgtacacccttcgggtgcaggagatggcgtttgaacttcaattaagacggatctatagcagacgtaatattttgagtttccgagagactgaacacatttcaggtcaacaagggcttgatttgcagaaaaaaacggatggtaccgtcaatatactcggtgaggttgcgagtgatgaggtggccgcatggatgattcaaatgtctcaggttgccagtctgttcaccctgtttacccaccatgccaaaacgtttcgtgatctggtcttctccctccgaaattccttgctcaagacaggtatgttccagcatgagcatattgctgaggagcaggttgtgagtgtaatcaacttcgatgttcatatgaagaaagatgctgagggacgaagatatatcgaacgaattacggagtgtcttcctcgtgcgaatcaaggtgatagcgtggaagagagggcagggttttcatttcataatgttgtggagtacagagatggagcgtatgttgcaacagctccaatctcctctggaagcatggtggatatgcgagaccagatgacattacaggatgccgagaaatttgaactgtttatgaagcaacactggggtgatcagcatgacaattaaatggattctgctcctcgtattaagtatttgtgcagggggtttgctgattacacttctcgttttaagtatgttacgtcacagaggaggtggttcaacaagtcaatccggcgtgatttatgctcctagcgggaagggattcaaaggactgggatcaatcttattgcagtcctaccgtcttggaatgaaagtgccattgctatcagcttatattctacaggtgcagaaacgtatttcattccgccatgttggggatgagccctcacttcgtaggctgacgatgacagtggttctaattattcttggaggttatggaggcataagtgtcattctgtttcttctgcagccgggtatcgcttttgtaatactgtccgtgctctgtgctgtggtactaaacagcctggtattggatatgtgccttagtcgtatggagaaaaggttgctggtgcagatgttggatctctttgcagatgtaaggcatcggtatcatcagcatggcatggttgaggaagcgctctatgaagccgctgaagcaggtacaggagaagcagcagaacaagtaagactgatctacgaagctctaacttctccagatccgaatgaagcacttgagcgttattatgaagtggctcctaaccgttttctcaaaggatttgccggcgtttcctatatggttatggagtttggggataaggacagagcacaaggctctatttatcttaaaggacttggtaacctgactcaggagattcatctggagattttgcggcgtgataaattggattacctgctcaaaggacttaatatcatcgcgctagctccggtattgttcaccgctccgatcgaacgttgggctagagtcagtttcccaacgatggatgaattttatcgcagcaaaatcggttttgttaccaaaatatccatctatgtgatcatcatccttgcttatttgcttctgcaaaggctccagcaatacgatgagacacgttaccgctcagggcataaacattcatggttggatcatttactgtacaagcaaatcttcatacggaaattggcgatgttgtttgcggcgaaacctggcagtacacagtacagccaaacgatacggctcatgagggagagcagctcagagttgaaatacgaatggcttgccattcgtcgagtgttgttattcgcaggttgtttggtccttacaatgggttgcatcttgctgttgcaccaggttgaacgtaaccacatcttgtatgatccaatccgcgatgatcgaatgtttggtgcaatggctgaaacggatctcaggaaagctgaggaaaaaacaacgttggatcaatccgttctggaaagtgtagaaatgaaccgaggagctacatacgaagaagtctccaaagcgttacagcagttatctccagttcagttagaccatgatacccagaatgagacgatcacgcgcattatgcagaaacttgaggtgtataacaagcaatatgtacgctggtgggaaatgattatagccattctcatgggtgcagcggggtactacatgcccgtatggcttatgttatttcagcggaaaatgcgaaggttggatatgcgacatgaaatatatcaattccagacagtgatttccattttgcgtgagatggaccgtatgtcagttgaagagatattggaatggcttaatcgatttgccgtcattttcaagcgcccgctacaaaaatgtttgttgcattttgaacatggaccagagcttgcacttgaacaattaaaggaagaggcgggcttgcccgagttccagcgactggttgataaattacagcttgcccttggcaaaatctcaatacgtgaagccttcgatgatctcgaaagcatgatggcattttattttgaacaacgcaagcaggagtacagcaaaatgatagatgtcaaagcatcatggggcagaaccattggatttacacctatgtacgcccttatctttttgtatctggttattccattggtcggtatgagcttcttacagatgaacatttattatgagcaaattcagaaactgtagcacaattcatctgtgtgacagtctgaaatagtttaataacttataacttgggaggatttatcatgaacaatgcatcaagtgctttaaaggtggcagcagggatattcttaacaatcgctttgatcacaattgtagttctgttgtttatttcggctcaggaggcaaccaagacggcccagaacaattttgctgatatccaaaccgagttgtctcaggccgcatttacggtgtatgacggaacaaccatcagtggatctcaggtaaccaacgcactacgtaaatatgcggacaaggaacagtttggtattaaagtgattacgggtaaaaatgtagctggtcaatggtacggtaatcagttgaatatttctcaggatctcaataatgcggattatggctctgttattggacctgaagataaggtgggtattattaaccaaaccatgagtgaaaaagacaatcagtatgtcaatccaagtggtaaattcaaagcgattatcgtgaaagaccgatcgaacgtggtaagagggctgatcttccagcaatcctgacaggagttggtttaacatgtcccggaatacacagcatctcatgttgttttgtacggcggttgtcctgtttgtgacagcctgcctgtacgggcaacagaatgttaagattttatcaacttcattgaataacagagtacagacaacagcaggtatggaaggtcggctgacaacaacattgcataccaccaaaccggatcagtataagggcgcagaagtattgcataccgtgaggcagatgacaggcacaggcattcctgtggaggtagatggaacttcgtatgtgattgatccacttgtcagcaaaacagcgacgattcctgtccagctcgatgccacctacagaccagagtgtatacgaaatgaatctggagaactgctcaagattgttttttggaaggaggcgagtgtgaattgattaatgccgcatccaagctgcttgccgtattgctcgcagtccttctgctctatgtgtacccagctgctgaaacagccgatcggcaggatgatatagcacgtatgacggctgttcaaaatgtaacacgttttgtcgatgctgtccgaacgaaaggatatatttcacctcgaatgttggctgagttggaggagcaactggcccagacgggcaatgtgtatgaggtgtcgatggaacatttacataagaaatatgtacctcactatacagacccgatggacaataacagttttaacgggacctatgaggtagtacaggatggatattatgcagctcagattcgagaaagactattcccatcctcaggtgtgataccggttgatgatcctggccgaagatatacgttgacgacaggggattttttcaccgtgacgctccaaaatacaaatcgtacaccttccatgctcattcgtgaatggttgagtggtacggctcaggcttcagcagtatttgtaacatacggaggtatggtcctcaatgaagattactgagctatccattgtattcgtgctgatcttcttcccgctcttctggatcatctcactccatacccaagatgccgaagaggctcaatatcttggtcatcgatacagatctgcacttcaaactgcagtcatggatgcaggtgcagtgatgcatcagaatgagaaacaaaatgatgaagcaggttatgattcaaccaaatttgttaaagccgataaggagcttgccttgttgacatttacgcagacgatggctttgaatatggggattcaggatgatcccgcagctattcgaaacatgtttaattacattcctgccgtacttattctggattatgacggctattatatgttgtccacagaaacagagttgacaggtaaccttgaagattctttcaggcgagtatggagccccaagaaaccttatacatattcagattctaatggtaacagtattaactttacactggacgactacgtatatgcctacgacgcaagtgcagggaaatggattgagggatttcaaaaagaactggcttcaaccacacagatccctttacttcagaataccagcgtatttgagcaagttagacaaagccggattgtgactactgtgcaggataatctggctgatgtgattaaccgccataatgagtttgccagaaagaacggtatttcctatacgtttacgatgcccctgattgcgcaggaagattggtacaactccataaatgatacagggattatggcctttatccaaggtataggtgtgggtgaccagaagatcaacaattatgcgatcggtggaggcagacttgtgaagaaaacggccatcgtaggtggggtagatcctttaacgggtatcaagtactactatccctccacatgtggtaatggttaccgtgctgaagaggtgtttacagacgcaaaacaagcagctgcacaaggctatttcgaatataaatgctctaatcgttagggtagcctgtatgacaaaatcatgtaagaggttcctgaactgtttacattactttcagaaaagacgggacctgtgctagaatagggtttcggaacaataacaaaagtaatgtctaatagataggagcaacctcatcttatgagtttattgtcagtagagaacgtaagtcacaattttggagatcgcacgttatttaaaaatgtatcgtttcgtttacttgccggagagcgcgtaggacttgttggtgccaatggtgtgggtaaatccacattaatgaacatccttaccggtaaattgcttaaagatagtggaaaagtggaatggacacccaaggtccgttatggatatctggatcagcacacaaagcttaccccaggcaaaactattcgtgacgttcttaaggatgcattccttccgttgcttgaattagaaaaagaaatgatgaatattacggaccagatggcagatgcagatccagataagctggaacagttgctggaagagatgggcgatattcaggaacaactggaacagggcgacttctatctgattgacgtaaaagtggaagagatggccaatggtcttggtttgtctgcaattggtcttgatcgagatgtcgcagctctaagtggtggacaacgtaccaaggtgcttcttgctaagcttctgctcgagaaacctacagctcttttgctggatgagccgaccaactatctggatgtagaacacattgaatggttgtcacgttacctgaaggactacccgcacgcgtttctgttaatctcccatgacacggaattcatgaatgaagtcgtaaatgtcatttatcatttggaatttgccaaattaacgcgatatgcagcgaactataacaagttccttgagatggctgatatgaataaagcccagcatattgatgcgtacgagaaacagcaagagtacatcaagaaacaggaagatttcattcagcgtaacaaggcacgtgcttcaacttctggtcgagcgaagagccgcgagaagcagctggataagattgatcgaattgatcgtccagatgaagcggccaaaccaacgttcaaattcaaggatgcccgtgcgagcagcaaaacggtctttgagggtattgattttgaaattggatatacgtatcctttgctacctaaaatgacaatgactattgaacgtggtgagaaaattgccatcgtaggctgtaatggtgtgggtaaatcgacactgctgaagacgatcttgggaagaatatctccactcagtggaaagactttcttgggagattatctcgaaacggcctattttgagcaggaagttcgagctgggaatatcacgccgattgaggatgtctggaatgagttttcacatttgacccagaatgaagtcaggggtcatctcgctcgctgcgggttgaaaaatgagcacattacccgtccgcttaacatgctgagtggtggagagcaagccaaggttcgtttatgcaaactcttgatgcgtgaaagcaactggattctattcgatgagccgacgaaccatttggatgtcacagctaaagctgagttacagcgtgccttgcaagaattcaagggaacggtgttgctggtatctcatgaacctgatttctacgagggttgggttaccaaaacatggaatgttgaagaatggtctgagaaaaactagacaattcaagcaacgcttaatagaaatgaacggtgacaaaaaaatccttctatggtaacataggctacaacttcatatgaacactaggggggccgcacgatgtggctgagatggaagaatgcgattccggaccctttgcacctgatctggatcataccagcgtagggaagtggcgagcgcgtttcagtgaatgacgtgagcaaacggcaactcaaaaggatctcaaccgtctgcttagtaaattgaaacatgcagttgcgtgtataacgttatggctataaggtctatagctttattgcacgaaatgaactgtatgtatcagtcagtcatctggtcctataattaatacgcagccactcccctacgggagtggcttttttgtgttttcatagcattcacgcatggaaggagatgaaaagtacggtaatttctcatgaacgtgtacacggatcatttgaactgcatgttgtatctacgggtgtagggaatcaagcatcttttgtaaaagctgcaaaggacgtttggccatgggtggactacatccatatacgagagaaacaactctcgtggcaacaaaagatcggttgggctgaaagtctgcgtggtgttggcgttccatcttgtcggatcgttatcaatggttcagaactgccaccacagattgacatctatggcggtgtacattgggggcaagatgcgatacgtaactataaccctgctgtaataagcaatgtgcagcgacttcgtctgggtgtatctgttcattcaatcgatgaggcaaaaatcgctgaagaacggggagccgattaccttttcttcgggcatgtctactcaaccaacagtaagcctgatcttgaaccaagaggattatatgctctggctgaagtgtgctctggtgtctccattcctgtcatggcgattgggggcatcgaaccgggaaacattcacgctattcgctctgcaggcgcacagggagtcgctgtgatctcgaatgtatgggggagcgattccccggatcgggctgctgcattattaaggcaggctatcgtcgctacagaaagtttgagccgctgaatcaaggagatgagagaatgaaaaagatcattactgatagaccggataagattcatgcagaaacgattattgtaggtggaggcgttgttggttgtgccattgcgtatgagcttgcttcccgtggacaggatgtgctgttactggagcgttcggcgattgcaggaggcacttcttgcgcggcggctggaatgctagcggcagatagtgaggattttgctcatcctctgatggctaagcttgccaggcaaagtagacagttacttatcgagcaacaggtgctaatggctacactcagtgaggtagagactggcctgcaacgccaaggattcctaactccttttcgttcatacagtgaattaagtagctataaggacaatcggaagtctgcgttgtctgctgatgaggtatggtgggatcgttccgttgtgcaacaggaggcatcatggcttaacagagatacgtatggagcctactacagaccttatgagagtgagattcttccagtccatttaacgaaggcatatgctgaatccgctcaagcattgggagcgcgggttatggaggacatacaggatatacgtgtgcaagcaaacgaacacggcgtgcaggggatcaccacatcgatcggtgagatgaaatgcgaacatgtcattatagcggctggattacagagtgaagagttgatgagacatgtgaatctgagcttgcctgtgtggtcggtaaaaggtgaaatagctgccgttcagttctcagatgaacatgcagggtacagacctgatagaacggtgtatgcagaggatatctatattgttcccaaagccaatggagaggtttggcttggggcaaccagtctgccaggcagaacggatttgaacgtttctgtacagggtgttcagaagctgctaacagcggctacccactgggtgcctgggatgaaggaagcacaatttatacgagcgtgggcaggcgtaagaccggcaactcccgatggactgccttatataggtgcttgcaagagtatacccgggttgttcgccgcctttggacattaccgcaacggtatcttgcttagtgcgataacaggcaggcttatcgctgagttgctcgctggaaaaagctcagaagaactcggaattgaggcgctgagccctgagcgattgaacagaaagggagtggtgcagtgaatatcatcgttaatggtcaacggatggagattgaagacagattgaatcgtgtggataaattactccaatcttttgatttgcaagtcaagactgtagttgtagagctgaacaagcatattttaacccgtgagtatcatgaaacgacggcattaagagaaggcgatcgaattgagattgtacattttgtaggaggcggttgatgatgttgaacattggtaaatatacgtttgagtccagattgttgcttggaacaggtaagttttcggatctggaagtgcaaagtcaggctgtggaagcatctgaaacggaagttttgacctttgctgttcgtcgtctgaatctggaagagcgtaaccagaagcatttcctggatacgctggatctggataaatacacacttcttccgaatacggcaggggcttccactgcggaagaggcggtgcggattgccgagcttgcgcgggcttcaggactttgtgatatgataaaagtcgaagtcatcggagatggaatgacgttactcccagatccgattgaaacgtacaaggcttgcgaaattttgcttgagaagggcttcacggtattgccttatatttcggatgatgtcattctggccaaaaggctacaattgcttggcgtacatgctgtaatgcctggcgcttctcccatcggagctggtagaggtatcatcaatccctataaccttgagatcatcattgagcaggccgttgtacctgtaattgtggatgcaggattgcgctccccaaaagatgctacttatgcgatggaacttggtgccgatggcgtattgttaaatacagccgtatccggatcaggggatccagtgagcatggctaaagcgatgcgattgggggtagaagcgggtagattggcatatgaggcaggcatgattcccgtaaagcgttatgcagcagccagtagtccggtggaaggaatggttcatacatgacagatcaaataacatcttccgagcaggccgatcgttattccagacaggaacggtacgcgccacttggcaaggaaggccaggccagattaaagggcagcagagttttaattgtaggcgctggcgcactcggaacaggaattgcagaaacgttagttcgttcaggagtcggacacttaacgattgtggatcgtgattatgtggagtggagtaacctgcaacggcagcaattatatgtagaacaggacgcgcttgagcggataccgaaggcaatggcggcggaaaaacgtttatctgccattaattccacggttcatgtggaagggaaagtgttggacgtcagagtagatgagttggaagaactcgttcagcatacagacttgatcatggatgcaacggataactttgatacccgactacttattaatgatatggcacagaagcacggtattccctggatttatggtggatgcgtaggtagttatggtattacctatacgtttatgcccggagatacgccatgtttaaattgtttgctgggtgaagtccctctgggtggagatacctgtgatacgtctggcatcatacctcaagcggtacagatggtaacggcgaatcagacagcagaagcgatgaagttacttagcggcaatgcaaatgcattgagacgtaagttattgtcatttgacatgtggaggaacgaatacatatccatcaatgtggatggtgcgaaaaagcaagactgtccttcctgcggtacttcggcaacgtatccatatctttctgcgtccaatctggagaaaacagatgtgttgtgtggcagggacaccgttcagatccgacctgcaaggcgcatgaatctggatcttcaacatacagcagatcgcctgaacaggcttcaagaaggaaaagtggaatccaatccgtttctggtttcttttacaacaggagtccatagaatggttattttccaagatggacgtgtcctcgtacacggaacaaaagacacagctgaagcacgtacgcttgtccatcgctactttggttaaagcaagaaagaagcaaagtctgttcccttgagggaatggactttttcattttacggcatgctatctgtaccaaccattgctgcgagcggtggggatagagacaggccgggtgaaaaagagtgaaaacagccattttgctgattggagcaggagagcaggtcagccttattcaggatgttttatgtagcgaagggtatgaagtgcaacgaatggagtggtctgaactaaaccaatccgtcgagccttcgttgttgcatattaacctgatcatcctggtagaccgggaagaggggacgaaacattgtggcaaggatcagaaattagaattaaaacgatggttagataaaggtcaggttatacctctactggttattacttcaaatgcatctcctcagttcatcgtggaatggctggattatggagctaatgacgtgatggaggaacccatccacatgaccgtaatgcttgccagaatacgaaacttattgcgtgtttttgcgaatgcaacaccagagggcgaagaagtaattgtagtacatgatcttaaagtgaatttgcgttcaagacgggtaaatcgtgcgggtgaatacctgacattaacaccaaaagagtacgaattgctggaatttctggccctgcatgtgaataaagcatgtacccggagtgatattttgcgggaagtatggggatatgagtatgcgatggataccaacgttgtggatgtgtatatcaaacatctgagggttaaggtggataagggaagaagtgtgaaactgattcatactgtgcgtgggatcggttatatgttgcatgataaaaattagattacgaaggttagttccatgaatcaccagtttagagtgtggcaaaaagagggtaaaaataaaagaccggataatacccccggtccttactcattagctatgatgtgaatctaaagtacacgacgagctttaacatacgttctcttccaagtaccagagtccagatcagagagggttacgcctggagatccgtacgtatgcagaatcttaccatttcccgcataaacgcctacgtgagtgacattggaaccggtagaacggctaccgctggagaagaataccagatctccgacacggagattagctttagacacagctttaccttctttggattggttcacggaagtgcgcggcaaatctacaccatactttttgaaaatatatttcataaaagaagagcaatcaaaaactttggttgttgaggttgaagcaccaaatttatatggagttccagtaaattgtttaccatagttaacaatctgttgacctgtggatacagaagcagttgctgcctgtgcaacaggtgcgttagtcattaatacagctccaaaacctagtgtagcgcacaacccgacggttacggccttttggacaaagatgtttgttttcatgttagttagtacctccaaaattcgttttcgttaagttgctagagcgagtataacagctttgtaacagcctagaaattggataggggagtgtaatcccttgcaccacaatggtttgggtatgtttattaaaatatgattaaaaatgtcaaaaaattaatcattgacgaatgaagaataatgatgaaacaacaaagacccttgaatatcaagggtctttattatgtgtgaacctattttcttgattgaatcactggttacaaaaacgtaataaataactatgaagcatacgaatagattcaatctttgctctgaataatcagtaataagccgctatcaatagtgactgtaccggaggagcctaagagcttgttgcttacacccaaggattgtcccatgcgaatggtggcttgatctagcggatacataaaaccatctagagttattccagtaacttcatgagtcaaggggagcagagaaacatatttatagtcacggtcctcaaccacagctttggatgtggtcagtgtcatgtaattgtgcttgtcctgaatggcacaggagatatgatgctgcatcgcgcgaaccataatatgtacattggcgagtgtgtgatccatacgtgtacctgtagcacctaacattaagatgtgagaaggttcgtaatctagcgctgtctcaaaagccatttctgtatcagtaagatctttgtgaacagggtcgcatgtaatgaaccgaatgctattgttacttacaatgatacgttcctcttcattaatggagtcgaagtctcctactgcaatgtgtggctgaattccgtgttcaattaaaaataatgcaccgcgatcggccgcgatgatcatatcatcttctcgtatttcctgaagtaattctacagataagtttccgcctgtaaaaataataatccgtttcgccgtcattttatttcatccttcctaattcagagaaaaatagtccattgttcaaatataatgttggaacctgtacaaatatattcaccaaaccagtataatccacaaaatgtggttgcacaatttcagtgctcgcggatacaatgggtagagcgacatggagatgacttgaaaagtgaggtttgaacaggttggacttacacatttttgaagtattcagcattataggcactatcgcatttgcaatgtccggtgccttcgtggcaatggaagaggagtatgacattctgggtgttctagtgcttggacttgtcacggcattcggaggcgggattatccggaatgtacttataggtatacctgtaacgacactgtggagtcagggatcacttattatgttagccctagtatcagtagcgattgcgtttatattacctctcaagtggattagtcactggaagcgaacagaggcgctgtttgatgcaatcggactcgcagcatttgcaattcaaggggcgctctacgcggcgaacatgggacatcctattagcgcagttatcgttgcagcagtaatgaccggtattggtggaggcgttattcgtgatgtgcttgctggacgtaaaccgcttgtattgcgtgacgaaatctatgctgtatgggcaatgacagccggttttgttataggtatgggctggttaacaacgaatgctggattattattttgttttgcggccgttgtgttcttccggatgtgttctgtacattataaatggaaactgccacgtcgtttgctcgtaccatctgagaccggaaacgtcagtcctcagccggagaacattgtgacacagccaacatcgtcggtacttcaaggtacgttaagcaagggggattaatatgattaatgttttgtttgtatgtctgggcaatatatgtagatcaccaatggctgaagccgttttgcgtcacaaagtcctggagaaggggcttgaacaccagattcgtgtggactctgcgggtacaggggactggcatgttggtaaacctccgcatgaagggacgcgaaaattgcttgattcgtaccagatttcttatgccaacatggcagcaagacagttcgccagcgaagactttactcaatttgattacattgtgtgtatggataattccaatgcagataatgtgcgcaacgttccaggcggagctgaggcggacatcatcaagttcatggacatgcttcctaaggaaaaactcagagaagtacctgacccatatcacacaggcaattttgaagaggtgtacgagctggttaacgcaggctgcgatgttctgttgagtaagattgaagcggaacattccttagcctaaaaagtaaacggaattcatgcttaatttgtaattggacaaagaagcaggattagagcacttaaagcaagcaggatatcctgcttctttttcaggttacaattgtaagcggtatcattaaaatgaaaaaaaatagcggcatttcagccgcttgttaaagtggtccttttatctttcctggagaaaataaagtaatgcttcgggcaattccttctgccaaaaaccccattggtgttttccgtctttctcctgataggagacgagggcaccacgcttttccagtaattctcgagtatcccggtttaattgaacaaaatcatacgtacccgtgtctgcctcgaaatcagtctcttgcaagccaacaatcatccagatcgagagccaagacagatcttcagctgcggcatagatctcctgtgaagcagagtagaaggcaccagacatgctgatcacacgtgtaaacagatccggatataacagagcaagatgaagcgaaacactgccaccgagcgagtctccggcaagaatgcgttcctgcggagaacggcgcacaggatatttctcttctatatagggaataatctcttcagcgaagcaagtggtatatgccttgaaccgatctccaaatggagcatattcctgcgttctcacagacacatcgacctgaacccctacaataatgaaaggttcggctccttcgtccagaataatttggttagctgttgtagcaattcgtccgaaattaaaaaattcttcgccatcctgacaataaacgacagggtagctaagcaattcgttatagcccggaggaaggtaaatacggagcgttcgcttctctccgagatagcgactttcaatctcttccttcacaatcgtgcgtttcaaatagcgggaatccgtcataaaacgtcacctttctcggttaattttttgcattcgaccgcgcaatacggtaagattacccttgtgcggggttgggtcaaacacgcaatcatgtattatgctgttataccaatattaagcccctgttatacatacaatccggcaggaaacataaaaaaattacggatttctttgacgtatggagtgaaacaggtgtataataatattataacagcggaacttgatattcaaattttttgttgaggtgaagaaaaaaatgagcaaggttccttatgaagtgtatacagaggatgtagaagctctgtccgtgctgtctcctgacggcgaaattgttaacaaagacatgatgcctacactttccgatgatcaattaaaagaaattatgtaccgcatggtatttacccgtacttgggatgaccgtgcagtaaaccttggccgtcaaggtcgtcttggtttctatgctccagtatctggtcaagaagcgacaatggttggtagtgaatttgcaattgaaaaagaagactttgtatgtcctggctatcgtgacattccgcaactcgtatggcacggacttcctctttatcaagcattcttgtactcccgtggacaccaacatggtggacaaattccagatggcgttaatgtattgatgccacaaatcatcattggtgcacaaattctgcatgcaatgggtatcgctatgggttacaaattgaagaaacaaaaacaagttgttatcacgtacacaggtgatggcggttcttctgaaggtgacttctatgaaggtctgaactacgctggtgtatacaaactgcctgttatcttctttgtacaaaacaatggttatgccatcactactccttttgctaaacaaactgcagctctttccatcgctcacaaagcggtagcagcaggtatcaaaggtgttaaagttgacggtatggacatcttcgctgttatcaaagctgttcaggaagctgctgagcgtggacgtaacggagaaggcgcaacattgatcgaagcagtaacttaccgtttccgtcctcactccctttcggatgatgcttccaagtatcgtacaaaagaagaagaggcagaatggtctgctaaagatcctatcgcacgtttcgctaaatatctggagaaaaaaggtctttggactgaagaagatacagcacgtgtgaaagaagaagcaaaagctaaagtaaatgaagagatcaaaaaagcggaaaaaaccgagaaaatgacgatttcaggcttgatcgacagcatgttcgaacaaacgcctaagcacttggaagagcaaaaagctgatttccaataagttttttccgataaagcataaacatccgcgactttaatgtcccggtatacatgtacgaattcaaatgtgaactgtcaatgtttaaggaggaaatgaagcaaatggcacaaatgaacatgaaagaagcaatccgtgatgcgcttcgcgtggagttgaaacgtgatcctaacgttctgcttttcggtgaagacgtaggtaatgtaggcggcgttttccgtgtaacggaaggtctgcaaaaagagtttggcgaagagcgtgtatttgatacaccattggctgagtccgctattggtggtctggctgtaggtctgggtgtacaaggcttccgtccggttgctgagatccaattcgttggttttatcttcgaagcccttgaccaaatggtagtgcaagctgctcgtatgcgtttccgctccggtggaaaatataattctccaatcgtattccgtacaccattcggtggcggcgtaaaagcggcagaattgcatacagattccctggaaggtctgctcacgcaaacaccaggtatcaaagtcgttgttccttctaacccttacgatgcaaaaggtctgatgatcgcttctattcgcgataacgatcctgtattcttcatggagcacttgaacttgtaccatgctttccgtgcagaagtgcctgaagaagattacgttgttgagttgggtaaagcgaacgttgttcgtgaaggttctgatgtaacgatcattacttacggtatgatggttcacacttctgtgaaagcagcagatgaactcgaaaaacaaggaatcaaagttgaagttatcgaccttcgtacggttagcccgatcgacatcgatactatcgttgcttccgttaagaaaacaaaccgtgcaattgttgtacaggaagctcaaaagagcgcaggtgttgcagctgaagtcattgcccaaatcaatgaaaaagcaatcctgcacttggaagcgccggttctgcgtgtagctggtccggacactgtatatccatttgcacaaatcgaagatacatggctgcctaacccggcgcgtatcattgctgcggttaacaaagtcgtaaatttctaatttaatcatctgacatgccgcaaggcgcagtatggtgattcacaccgcagcgcaagctgcactgtaaacagccattagccccttgagtaacagttatttgcattagcagtaacagttgtttcttggagttaagggttgttttcaggattgagcacataatcaaggaggtttttcagttggctaaatttgaatataaattccctgaattgggcgaaggcctgcacgaaggcgaaatcatcaagatgcacatcaaagtcggtgacaaagtaactgacgacgacatcatcatggaagtacagaacgacaaagcggttgtagaagtaccttgtccggttaacggaacagttacagaagtattcgctaaagacggtcaagtctgccacgttggtgaagttgtagcgatcatcgatgcagaaggcgaacttcctgagcaagacgacgctcctgctggcgatcaaggcgagcaagagaaagatgcagctcaaggcggagctgacacaagcggttcttctgcagcagcttccagctcggatgcagctaaagaaggcggcaacaacagcgttccggcagtacctgccaaagacgttctggcaacaccaagcgtgcgtaaatttgctcgcgaacaaggtgtagacatcgctcaggttaacggcactggcaacaacggtaaagtaaccaaagaagatgttgaatccttcaaaaacggtggcggttcttccgcagcggcatcttccgaagctccggctcaagaagagaaaaaatccgcagcaccagcagctgcagctgatcaacacattgaagaagagcgcgtaccattcaaaggtatccgtaaagcgatctctaatgcaatggttaaatcggcttacacagcacctcacgttacaatcatggacgaagtggacgtaactgaattggttgctttccgtactcgcatgaaaccaattgcagagaaaaaaggaacaaaagttacttatctgccattcatcgttaaagcactggttgcggcttcccgccaattcccggctctgaacgctatgattgatgaagaagctaacgaaattgtttacaaaaaatactacaacatcggtatcgctacagatacagacaacggcttgatcgttcctgttatcaaagatgctgatcgtaaatccatctggatgattgctgattctatccgtgatctggctgctcgtggtcgtgagggcaaattgagcgcgaatgaaatgagaggaagcacaatctccatcagtaacatcggttctgctggcggtatgttcttcactccaatcatcaacttccctgaagttgctattcttggaacaggacgcatcagcgaaaaagcagtgatcaaaaacggcgaagtagttgcagcacctgtaatggctctttccctgagctttgaccaccgtatcatcgatggcgcaacagcacaaaactttatgaattacattaaacagctgctcgctaaccctgagctgcttgttatggaggtgtaagatatggtagtaggcgacgcttctctcaatatcgacacattagtaattggtgcgggtcctggcggctatgtagctgccatccgcgctgctcaactgggccaaagcgtattgatcgtagacaaatccgaactgggcggtgtttgtttgaaccgtggatgtattccatccaaagccctgatctctgctgcacaccaatatgagtctgcacttcacggtgaagcttttggtatctctgctgagaacgtaaaagtggacttcagcaaaactcaagagttcaaaaacggcgttgttaagaaaatgactggcggcgtagctggtttgctcaaaggcaacaaagttgaagttttcaacggtgagtgcatgttcatcaacgaaaacgaagctcgtgtattcaatgaccacgagtctccacgttacaaatttaaaaatgcaattattgcaacaggttcccgtccaatcgaactgaaacctttcccgtttggcggacgcattctgtcttcgacagaagctctgaatttgcctgaagtaccaaaaagcatgatcgttatcggtggcggatatatcggtgctgagcttggtcaaatgtactccaaattcggtgcgaaagtaacaatcatcgaaggtttggatacagtactgccaggtttcgataaagacatgactagcctcgtggctaaaaacatgaagaaaacaggcatcgaaatcgtaacgggtgcaaaagctgaaagtgctgagcaaacggataaagatgtaactgttaagtactctgtaaatggtgagtccaaagaagtaactgcagattacctgctagtaactgttggacgtcgtccaaacacagatggagaactgggtcttgacatgattggtgttgacgttgacgagcgtggatttgtcaaagttgaccaccaaggtcgtaccagcattcctcacatcttcgcaatcggtgatatcgtatctggcttggctctggcacacaaagcttcttatgaaggtaaagtggctgctgaagcaatcgcaggacaaccatctgtagttgactacaaatgtatgccagctgttgtgttcacagatccagagtgttccagcgtaggttacactgagaaagaagctaaagaaaaaggttacaaagtaaaagctggcaagttcccttatgcgggtaacggccgtgctgtatctttgaaccacgctgaaggcttcgtgaaaatcgtagctgacgaagaaagcggccttgtattgggttgccaaatcgtaggtctggaagcttccaacttgattgctgagcttggtttggcaattgagatgggcgcaactttggaagatctggctctcacaattcacgctcacccaactttgggcgaaatcgtgatggaagctgcggaattggttatgggtcacccgatccacatcatctcccgttaagatcatctaagcttcggatccgtccggcattatacgtatatcagaagagacgaatgacgttaacgcgttattcgtctctttttttctgagcaagagccaagaaatttaagatactcgtgtatgtaatatgatgaaaatttacacgctcataagtttcagtgaattgattttatccaacaactcaattgtggtacactgtagtaatgatcagtcatgatgtggctccaagctaatcacggtctatatatttagttaaactaaccttttacaccagaacgtagaggacagaaaaaacctgaagaagcggagctaaaagctttctgaaggaaagctgcatcggaaggttgttctgtcatcggagtggtaagtgtaaatattctttattgaggagatttcaacatgaaaaactatctcgatttattgcaggatattctgaacaacggcgtgcataaaggagaccgtacaggaacaggaacacaatctgtatttggcagacaactccgttatgatctctccgaaggatttccgctggtaacaaccaaacgaattcatctcaaatcggttattcatgaactgttatggtttttgagtggcgataccaatatatcttatttgaaagaaaacggtgtgaagatctgggacgactgggcggacgaaaatggggatctcggtccggtatacggctcgcagtggcgtacatgggaagcaccaaacggagaaaaaattgatcagatcgctgcagtcattgattcgatcaaaaataatccggattcgcgtcgtcacctagtcagcgcatggaatgtggctgagatcaataatatgaagcttccaccttgtcattttgcgtttcagttttacgttgcagagggtaaattatcttgtatgcttacgatgcgttccgtggatacgttcctcggattgccgtttaacatcgcgagttatgcgctcttgactcatatgatcgcccagcaatgtgatcttgaggtaggtgagttcatctggtctggaggggatgttcacatctactctaaccatgttgatcaggttaaaacgcagctggagcgtgaaccttatgctttacctaagctggtaatcaaacgtaaaccggattctatttttgattataagtttgaagatttcgagtttgagaactatcagcatcatccgggcattaaagctccaattgcagtctaattatgtgttcaatctcgacaagagacttggattgaaggagtgtattacccttgagtattgaattggtatgggcaatgggggagaacggtgtgatcggattaaataattcgattccatggcgtttacccaaggatatggcctttttcaaacaacgtacgctgaacaaaaccattatcatgggacgtaatacgtgggaatcttttggcggtaagccgcttcctcagcgtcgtaatatcgtagtgacaagagatctgaactacaaggtggaacaggctgaagtcgtacatacgattgaggagggtctgagtgtaaccaaaggtgaggaactgtgcgtaattgggggttcccaagtgtatcgtgagttcctgccacttgcagatcgtcttgtggtgaccaaaattcatgagaattttgagggagatacgtttttccctgaagtggattggtccgaatgggaactgattgaacagattgaaggcgaacaggatgaaaaaaatgttcatgagtatacattcgaattttacgaacgtaaacggtaaatatggtataggaaattcctgacttcggtcgtatttgtatgatgagagggcgctgattacgaaatattcgtgaacagcgtcttttctttataaaaaaatgagtcacttgtttaaactagaatacatataacattaatataacataagtaattggaatttatgtataatatacatacggccaagcattaaacagtaaaaaagtgtaaaagttttgggggtttaacgtcgtgaagccctaaaacaggtctgatattcggaattgagaacgatttatagcaaaacatgttggatttgatgacaaattatctaacattcacttaacgtttcgaccttttatttctgtaacacacaccagatttcgcagttcaaaaccacatttaacaccaaaataagggtattgaccatgggtagacttgaaagatatgatgtataaaatacaaataattatgcggataatccatttaatattcagcacagtaaatgctactataattgaaatatcttcgagaagattttgtgatacaatatacaaaaactcaagtaatgagtaatccatttcatatagaaccatgcacatgaagggattaagacaagaacggatgggggaaaacgtaagatgtctacacctactggatttatggaatacaaacgtcaactgccaacagatcgtgagccagcggagcggattaaggattgggaagagtttcataaacacatggctgaagaagagctcagaacacaaggtgcacgatgcatggattgtggtaccccgtattgccatacaggtatagatatgattggcggcacatcaggttgccccgtgcataacctgattccagaatggaataatcttgtatatcgcggactgtggagagaagcacttgagcgccttcacaaaacgaataatttcccagagtttacaggtcgcgtctgtccagctccttgcgaaggatcatgtacagttggcttaattggtcagcctgtaaccatcaaaacgattgaagaagcaattattgaaaaaggtttcgaagaaggatgggtggttccccaacctcctgaaaaacgcacgggtaaacgtgtagctgtggtaggctcaggtccagcgggattagctactgcggctcagttgaataaagcaggacactcggtaaccgtatatgagcgttcggaccgtgtcggcggattgctgatgtacggtatcccaacgatgaaattggataaaaacgtagttcaacgtcgtgttgatctgctcgaagcagaaggcattcaattcattacgaacaccgagattggtaaagatattgcagcacaacaactggtggatgaatatgacgctgttgtattgtgcggtggtgcaacgaagccgcgtgaattcaatattgaaggcagcgacttgaaaggcgttcattacgcaatggatttcctgaatggcagcattaagagttatctggactccaatctggaagatggtcaatatctgtccgctaaagataaagatattatcgtcattggtggcggtgatacaggatctgactgtgtggctacatcgctgcgccatggttgtcgtacgatcactcaattcggtacgcatacacaagcgcctatggagcgtgatcgaattaacaacccttggccgcaattcccgaacgtatacacacttgattatgcgcaagaggaagccaaagcgttgtttggtcaagatccgcgtgagttctccatcatgacaacgaaatttgtcggagacgatgaggggaacctcaaagaattgcatacagtacagatcgagcgtgttgtggatgagactggtcgcaagatttatcagccgattccaggtacagagcgtgtattcccggctcagatggccatgattgccattggttttgatggaccggaacaaacgttggtcgagcaactgggacttgcaacagatcgtcgcacaaacgttaaggcacgttacggcaaatacaacaccaatgtggataaagtatttgcagcaggtgacatgcgtcgtggtcaaagcttggttgtatgggctattaatgaaggccgtgaggctgctcgtgaagtggacaaatacttgatgggtgcttcggttctggtgtaaaagtatagaacaagatatcaatgacaaccttcgcgatcagcgagggttgtttgctgttattttaaccaatttgactacatatttcatgtaagtgtgagcaatatcattgctttttaagtgataaagatttattattatattataatgattataaataaggattaactgaaaccatgaatctctacgataaaagtaaatttcaatgaatataaatcggaggtgcgacctgctatggcaagtaaccgggacaagtccatttcagaacagatctttcacattaaaaatcaattggttgaaaaaggatataagttaacacaacaacgggaagttactgtacgtgtattgcttgaacatgagaaggatcattttagcgcagaggaagtattcctgctggttaaggagcagttccctgagattggattggctaccgtataccgcactctcgaactgctgagtgaccttcaggtcgttgaaaagattaactttggtgacggcgctgcgcgctttgatctgcgaagtacagacggttcccatcaccaccatcatttgatctgtacagaatgtggtaaagtggaagagattatggaagatggtctgcttcgtttggaacaacaaatcgagcgtcagtatggctttgctgttacggatcatcgtctggatttccagggtgtatgcaaagagtgcagacaaaagcatgtattaaaggaacaggcagcaggataattcatttcgggaaggtgctcccgaatccaaaatctgatataatgagtttcagaagcaaggggcttccgtcggcggaatgcccctttttgccgtcatgcggacggtgaaggaggagagatggacggatgaagacactggttatagcggaaaaacccgacatgggtcgaaccattgccgccgtcatagaaccaaaggccaagaacaatcgcacgtatctggagggtgaacattacatcatcacttgggcgatagggcatttgcttggactggctgaaccggatgcctatgatacaaagtacaaacgctggaatatagcggacctcccgatcatacccgatcagttcaagattgtacccaatccgaggactaaagatcagcttaaaatgattggagaactggcaaaacgggcttcagcgatcgttaatgcttgcgatgcagggagagaaggtcagtacatcttcgccctcatacaacagcaattgaagctgcgtcagcctgtaaagcgtttatggatatcggatttgacggcagagagcattagacgtggttttgatggtctgaaggatgcctctgaatttgaaaatctgacccatgctgctcgcgccagaagtgaagccgattggctgatcgggatgaatgcctcacgggcgtttacaacccgccataatgcattgttgtctgtaggccgtgtgcagacgccggtactcgcgctaatctacgatcgtgaaatcgagattgaagcgttccagtcacagaccttttatgaagtagccgcctggtttcggcaggaaggtgttgagtaccggggactgcgtcagggagataagttgaccgatacggaggcagcagaggccattgcagccagtgtgaagggcaagacagggcagattaccaaatacgaagcgaagcagacgaaggagtatccgtatcgtttgtatgacctgacccttttacagcgtgaagccaatgccaagtttggatatggtgccaaaaaaacactggatatcgcacaggccttgtatgaaaaacacaaggtgatttcgtatccgcggacaaactccaactatgttacagaacagaatattgaaggtatgcacaaaacactaaacctgcttaaaaatggtacctatagtgagcttgcgcagggggccaagccggagcttgttcataagaataataaaggggtatgtaatccgagcagggttgaggatcaccatgcgatcctacctactttgaagcgaccaggtaccttatccaaggatgagcagaacatctatgatttgattgtcagacgtttcttgtctcacttttatcctccggcagagtataagcaacataccgtgctcaccgaagtggagaaacatcagtttaagacatctgtcaaagagctgttgtccctcggatggaaagtggttctcggttctggagatcaggaacagggcggtgcaggcaagaagaagaccaagaaaaacggcaatgaggaagaggaagctgaagagtggacggacaaggcttttagtgtgcaacctgaattgcctgttcaatgcacgaagagtgagttcaaggagaaggcgacccagcctcccaaaagttataccgagggaacattgctgaaagcgatggagagtgcaggcaagcagatcgagaatgaagagctgcgagatgcgatgaaagatagtggtctgggtactccggctacacgtgcggctacaattgagcgtctcaaaaacgtaggttacattacgctgcaagggaagaaaatgcagttaacgctcaaaggcagaacggctattgagttgattcgtcgcgcgggtgtagatctgttaacttcacctgagatgaccgggcaatgggaaagaaggttatatcagatttccaaaggtgaggcaggtcaggacaagttcatggagaacgtcaagaaattcaccttgtccatcattgagaaagtgcgtgtacaagcgcctgctccagcagatgcttttggagaagattcacgggcaggcagggggaaaggcaagggagccagaacccaggccgggaatacaaggacatctgccaagacggctagtggcggttcaactgtaaaaacgtcccgtcaggctacggcatcttcgtccagagctggcagtgggaaaagcacgaccaccaaggcgccgtcctcaagtgcgagcccatctggagtgagagagttactggcaccttgcccctctcctggctgcacgggtcagattatagagggcaagaagggttatggatgctcacgtttcaaggaaggctgttcatttgtggtctggaaagagtatgcgggcaaaaaaatcaccagtacgatgttaaaatcgctgattgagaaggggagtacacaagtattgtcgttcaaacgaaaagacgggagtacggtgaaagcacgtattattttgcaagatgtggtaacaggcaaattatctggcgagaagcaggatgcttgatcttagttaacagttaacatacagcaaaaggacccttatccaagggtccttttctgttgctgctgttgtatattttcgtgtatgactttagggacctcttccagtgcagtgatggtatacatcgacgtttccggattgggctgaagttctacgatgttgtattgccattcattcggttgtttgatataaatgctgtgaattccggcttttaccgcaggcataatatctgtgcgtagtgagttgccaatcatccatgttgcacgacgatcaaacggaccattagacagaatgccttccagtgcctcgacgtttttgtgttgtcggatatagatccgatcatcaaaataagccgagagtttcatctgatcaatcttgcgctgctgaatcacggtttcgccgccggtatataagtagagggagtgtccagcacccttgaggttctcaagcgtttcaaccatatgagggtagggttcaacctcctgatcgtacacactcatacccaacttgctcagataagattcttctctgggagaggttaatctggcaaacttgccggagaaataacgataggtatcaatcagggattgcgggaaatgatgactcgcaaaaccaagcttgttcactccggttacatcgatctccagctgtttttcccgaatctcttgtgttgtcagagaatgtccatcaaaccactcttgcatattctcaaagaattctcccaaaatcaggttgaagtacttgttgcaatatacgagtgtatcatcaaggtcaaacaaaatatgttgtttcattattttcatgatctaactcactccttgtagccagtaaatccacaatgattcaactaaattaaatgcgaatataggattccaggaacatatttaattcagatacgccatccggccgaatactgtatttctctttacggttacttccgagcagatgggtccgtagcagacctgcgatgcgtagcgccatcacctggtctttgaccgtgtcttcgtctttacccagttcttcgcacatctcagcgagggatttgggttcatccgatacgtaacgaagcaggcgaagtctttcgggatcagccagcgcatgggtaaaacgtaaaagacatgttggtggctggtcttcgttctcttcaggtgcatctacgggatactgcatgatcatcataccctcatagaaacagtacatattaataggacgattgtgcaccgttggaaacaggatgacttcgttcagtcccggcatcggttcaacaagaacgcccgctgtagcatattcaataagcagttcagagcccattttatcaagcaaaatgcgtttttcttcggcatcttcttccagccacacacgctgatcttcgctcatattctgacagtagtgttcatcccatagtcgcaataatgggacataactgttccgaatgcgagtagattcttctatagtaagagccggcagaagaggagacacacgtgcaaacaggtcttccgctgtcattccggcaagcatgtccaggaaatcacgattctccgatgtatcattttgataggctgcccatgcaaacaaaacatcaaaatcatcaaaaggccaagtggcagcaggtgcgagcgcagcccgtacattggaacttagtttgccttccacttccagaatccattcaggaccaatatccagatgctgaatccattttttcgtgacataaaccagaaagctgttgagcatttcatatatcggtgaaacatcaattttcacatgataagccatattgttgcagaatcctcccgtcacatctaaatgtacgcagcgacttaagtacgattagtgcgtgttcaaaaagtctggttttcagtaccaagaagatggaaatggagtagcggagcgtaggaaaactacgtgagcaacggacatttcggctgaaattcatcttcgaagctgatgatgccactaggcatgattcgtaatcaaaagtgaactttttgaacaacctctattatggcttgttttgcagggcgttgtccactataatgttcaagtccggggcaaagccctgatctttgaatagcagtttaaaaccatatgtataacatacaaaagtcgtcagcgatggcgatttttctttgtgtgctcgcaggaggaatgaattcgtgtcatcgattactcgtcccaaactatcacactcgacagccaactatctcattttgattacggttattgtggtggcgggaataagtcaggggcttttgctacctgtgctttcgatttttttggagcaaaaaggggtttcaccaggtttaaacggattaaacgccgccgcgttgtacattggctcttttgccatgactctcgttgcggagagactactgggtgcattcggtttcaaaaagttgattgtaggtggcctgatattagtcatggtccctttaatactatttccgtatttaccagatattaaaatatggttcatattgcgtctgatcgttggaataggagatagcgcacttcattatgcggctcagctctgggtgctacttgttaccgctcctgaaaagcgtggacgctacatatcactatatggcatgtcctacgggctgggattcagtattggtccgctgggaattaagctgcttggcttcggtgatgctgtccctttctgggtcttgttcatctgtatagtagcagtacttatactggtattaatgaagcttccggatacaaaaccggaaaaagcagagcatggccaactgcctgaacgtcgcttccgtcgtagtctggcatgggcctggtatgcacttttaccagcactcttatacggatatatggaagcgggtatgaatagtaacttccccgtttatgggctacgtattggattcgataccaatcagatttcgtcgttgcttccttttatcgggattggaggtttgttccttcaattacctctcggaatgttgagtgaccgatatgggcggaagaagatattgatgtttgcgggcatcagcgggggaatcatcttcatgctggttccagtcgcaggtacgcatttctggtggacgcttgtattgttaacaatcgcaggcggcctggtcggctccttcttctcactgggcctggcctatgccgcagacattttgcctaaggtgttgctgcctgcagccaacgttgtggcatcctttcatttcacgattggaagtattattggaccgaatctgggtggccagatgatcaactggatttcacccggaagcatgttcaccttgctcggaatcctgtaccttcttttcggcttggcaggtatattatttcgtcgtaaacctgagttcgaatctgtgttaaaatagaagctggtgttcgcatggaaattgatgtccatttccgagtacactagtggtagggaaaaacatggacaagaggagacatcgcgatgatcagagtagagaacttgagtaaatccgttggcgtggaccgcgttcccgttctacgggatattcgatttgatatgcaacagggtgagatgatagctgtagttggctcaagcggtagcggtaaaagcatgttgcttaaatgtttggccatgatggaaaaatgggattccggccggtttacggtggatggcgccgagattttgaaagaaggctggtctggaaaacggaaaatcaaacgggaatgggcatacttggaacaaaatccagaattatttcctagacgtacggctcttaaaaatgtattaatcggacgatcgggtcagactcctgtatggagaatggtaaccggtatggtacgttccgatgattatatgggtgctatggattatcttgaaggtttgggattactcgataaagcacatcaaatagcagagaagctcagtggtggcgagaagcagcgtgttgctattgcaagagcacttgctcacggtgccaaagtcgttttggcggatgaaccagtgattggtcttgaccctcatacagcagattcggtgctggaaatattacgcaaattatgtgaagaagaacgtgcaacagtcattgcagtactgcctattgaacttgctgagaaacatgccacacggatctggggattggcagaaggcaagattgcttttgatattcgtggacgaagactgacacagcaagaaaaaaaccagatttaaactattgaaaagagtgatgagattgtttaattcacggtggggacgctttgtagcagcaggaactatggcaattatgcttggttctgttctaagcggatgtacagtcataagtgatcccaagcttctgatgaagcaacctatgatgtccatggacaaggagaaattatatacgattgtacagaaggaacaaccatcggagagtaagttaatccggcccaaagatctgaataatacaagcatgattcgtgttgctgatctgaatggtgatggtactcgtgaggctattgttttctacgaaacccctaatgagaatgtgcggattcatggaatgctcttagaggaacagggtgatacatgggtgaaaaaacttacatttgacgttccggggaatagcttgcaatcatttaaattattggatattacagatgacggaaatccagacattgttctcggggtaagtgttgaagcccagaaagccttaatggcctactcctacaaaggaggtgcccttgaacaggtaatgggtggtgtgccctacaatcaatttattattgacgatattcaaggaaacgcgctggatttaaatggggacaacgaaagtgattttgtgatagtgacattaaatacgagtggttttgccacaattgccttatatcaatttaatgagggtagttttaaagaagttgatcgcatgcagactgactatactgttaaagaaatatatagcgcactcggcggacagattgctgagaacaaaatgggtattgttttggatgctgagttagatgatcgaagtactttttcacagatcatatatgtaaaagacgataaattgataaatgctttcaaatcacccgatcaaacttatagagatgacaaaattttaagtagtgatgtcaataatgatgatattattgagtttggattaaaagaaacaccaaagggttgggagcattatgtttttgatgagcgaatgtggttctatactttttaccaatgggatggaaaagatgggaagaaatttgtctcttttcagtatcgagacgatgcaaattcattccatttaaatctcaaatcggattggtatgggaaaataactattgatactaaatcggaaaaaaacaagtatattcgctttaaaatgattgacactgatgaaactgttggtgaaattaaatacttcacactttcgcagtgggaacaggagaagggaaagagttggaaagaaattacacggaacaatgaacatattattgcttcacgtggttctcaacttgatgggaaccctggactcttagaaaatttatcgcagacaaatagaaaggaagaacttaatgagtaaagtacttattcttgaggatgaggaatccatccgcagttttattgtaatcaatttgaagagaaacggattcgaagtacttgaagctggagacgggcatgaagcgcttcgcatactgcaaacagtacctgacattgatctggctctactggatgttatggtacctggtatagatggtttcgaggtgtgtcgcaggatccgtgagaccaatgaacgtctgggtatcattttcttaaccgccaaagttcaggaacaagataaagtatacgcactctctgttggtgcagatgatcatgtaagtaagcctttcagcccaacagagttgattgcgcgtattcagtctttattacgccgtgtgaacgtgcaccgggaaactgcggcgaaggttacgttccagtctggaccattttcactggacttgatctcgaagcaattcaagaaacagaatgaagccattgaattgactccaacggagttttccttaattcagtttttcctggaaaaagaaaatacaccgctcagccgcgatgtgttgttagatcatgtatggggcaaagagtacatgggtgatcccaaaattgtggatgtcaacattcgtcgtctgcgtcagaaaattgagaacaatccttccgagcccgaatacctccagactgtatggggtcacggctacaaatggaagggccgggagcaatgattaaaaaaggcattacgcgacagatcgtattacattacttcatcgtagtttttcttgctctgttgttagttgaattcatatttatgcttgcagtgcaaagatactattatgagagtatctataatactataaaccagcggattacgatgacaaatgattttaaagaacctttgtctctagtgaatggtgcagaagatggtaataatctatcgtatctgcttgtgaatcttcaacttgataatactgaattacaaattctcgatttgaacggaagagtattggccagttctacggcatttgagtcagaacatgctgttcttcagaccagtgacatctctcaggcgatgaacgggaatgtgggtcgttgggtcgggagacagccaattacaggagaacaagtgatggcagtatctcataaacttgaccttggaggcgagaatacttacgttgtcaggtacttgacatctcttgacctagttaattcaaaattactagtgatgggattgcttgcagctgctgtaggtgttgctgtgctttctcttgtattgatcatcagcattggtatggcaaattccattgtacgtccaattaataacatcaccgcagtatctgcccaaatggctagaggacggctggatgtcagggttaaggggaattataagcacgaactgggcgaattggcatcaacacttaacttcatggcacatgaaatcgtgcgcagtaatcagatcaaagatgattttatctcttcgatctcacatgaattaagaacacctctgaccagtatcaaaggctggagcgagacactggattcaggcggttatgatccggaagaaacccgtatcggtatgggtattatctccaaggaaaccgaacgactgattggacttgttgaagagatgctggatttctccaaattgcagcagaatcagatgaagctggtcaaaggaaccgtcaacattcgtgaaattgtacaggaaacgatgttgaatgtctgggccaaagcggaacaaaaacaggtccatctcaagttggaaacggacgagactcgtgcttataatgtccatggagacggtaacagactgaaacaagtcttcctgaatgttgtggataatgcgatcaaattttcacatgagaattcctggatcttcttgtcggtcaaagaggagaatggtcagatcattgcagctgttcaggacaccggtatcggaattagtgaagaacatttaattaaagtacgggaccgtttcttccaagtgaatcatcaaaatgggggaacgggactaggtcttgcgattacgcaagaattggtagaactgcatgagggaacgatcacgatgcaaagtgaactcggatcgggtacaaccgttacggttacattaccggctgtggctgaggagatgggtccagaagagtctgtaaccgcgtctggtgatgctgaagtcacagatgagcgaacagctagtgatgcaagcgatacaaaatcagatctagaaaagtcttaaggttttaaaagataagcgatttttctacctgatgatcgagcatgtacgctttataatatccatatcaacatcaacaccaaaaaaaggcgagccatctgaggctcgccttttacatattatgtttacttcattatgaagaaagttcgccagtgcgcaggcgcccacttttttcatatacttctttcaacatacgaacaggttgcgtacggacagccggtttggcagagacgatctcgttaggtccaacgaccacaatttcatccgccgtacctttaacgattgcaccgtccttgattattgcaccttcaccgatgatggcgcgttcgatgtgaaccccacggcctatgcgtgcgttaggcataacaacactgtctttaacctcagagcctttacccacttctgcaccgcagaagataacggaacgttctgaacgaccttcgattgcacaagagtcgtgaatcatggaagtaacatgttcgatctttgtatgtcttgctttgtaagcacttggcttggagcgccagtcgcgagtaaacatcggccagttttctttttgcagactccagtcttcctcgttgtgtaacagatccatatgtgcatcccaaaggctcttaaccgtacctacgtctttccaataaccattaaaattatagacaaagaggggattattttcgttcaacatttgaggaataacatctttaccgaagtcatgactggattcagggttagcggcatcttgcaagagatggcgtttcagataatcccatttgaacatgtaaatgcccattgaagccagattactttttggttcagccggtttctcggcaaactcggttacacgcaaatcagcatcggcagccatgatcccaaagcgatgtgcttcatcccatggaacttccataactgaaatcgttgctgcggcattattggcttgatgagcctccaacatatcgcgataattcatatgataaatatggtcacccgacaaaattagaacattttcggggttttgttgatcaatatagtcgatatttttataaatagcatccgccgttcccaagtattcgtcatttcctgtatgataagatggaagcaaggatattcctgcctcacttgagttgccatgtccccatggttctcctccaccgatgtgatcgtgtaaagattccgcttggtactgcgtcaatactcctacagtatcgatccctgagtttacgcagttactgagaggaaaatcgatgatccggtagtgcccgccaaacggtacagcgggttttgcgatactcgaggttaaaggggctaatcgcttcccttctcctcccgccaacagcatagcgatgcaatctttattaaacataatcgtttccctcccaaaatattgtgcattgtagtacatcattaacgcaaagtagagcagatgaaacgattgttactgtaaaaattcagaaaaaagacaacattttctaaaccaccgcatttttcttttcaacttggctagactggggtaatggttactgttatatctattttcttgagaagaaggtgatctcttggccattcaaccgttagcacacccggacatattgccggagcatatttatttatttcatgaaggtaaccttcatcacagttatcgaatgttgggcgcgcagcctgagacttgcgatggccttcgggggtatcgctttaccgtatgggcaccaaatgccgtagaagtaggactggctctggaccgcaatgaatggaaaggcgaaaaggaacctttatataagatacccgaatcaggattttggagtcgtttttttccggaaatcagcgaaggaactttatacaagttccgtatattaacggaagatggaacagaattgctcaaagcggacccatatgcgtttcaagcagaggttcgacctcagacagcctctgtcaccagttcaatcgaagggtacaaatggaatgatggagcctggagacgcaaacaacgtgccatgtataacaaacctctacatatttacgaaatgcacatgggaacctggaagcgcaaagaagacggaagcctctatagttatcgcgagatggctgatttgcttgttccttacttattagaaatgaaatatacacatgttgaaatgatgcccctcagtgagcatccatatgacctttcgtggggctaccaaaacacagggttttatgcgccaaccagtcgttatgggcatccaaaagatctgatgtatctagtggatacactacatcaggctgggattggcgtattgctggattgggtacctgcacattttgccaaagacgctcatgggttgcgtatgtttgatggtacgcctttgtatgagtatgcagatccgatgttagcagagaagccgggctggggtacacttagctttgactactcgaaacctgagattcgttcatttctgatctccaatgcattatattggatggagatgtatcattttgacggactccgtgttgatgcggttacgagtatgcttcggcttgattttgagaagcagccaggacaatatcgtaccaatgatgaaggaggtcttgagaacaaggaagctgtagcctttttgcagcagctgaatgagacggtgttcaagtatttcccttatgcgttgatgatggctgaagaatccagtgcatggcctatggtgactttacctgtagatgaaggtggtctgggttttaactacaaatggaacatgggctggatgaacgatacgcttgattacatggaatctgattttcatgagcgtccttccaaacatcatttgctgactttcccggtcgtatactcctttgctgaaaattatgtgctacctctgtcacatgacgaggttgttcatggcaaaaagtcgctcctcgacaagatgccaggaacctatgagcagaaatttgccggcatgcgtgcttttctgggctattttatgactttcccagggaaaaagctgttgtttatgggtggagactttggccagttcatcgaatggaaagatgaggatcaactggattggttcttgctggattatgacagtcaccgcaatttgcataagtttgagcgtgagctgtctaacctgtacttgagtgaaaaagctttgtgggagcttgatcattccttggacggttatgaatggatcactccggatgatcaggaccagagtgtcatttcatacgtacgcaaaggaaaaaaacctgcggatacactccttgtgctcattaactttcagccggtcaagcgggagcgttaccggattggtgtcatgcgtcccggtatgtataccgaagttctgaacagtgaccattccgtttacggcggttcaggcattactaatgatatgcaactgcctaccgaaaagattccttttcatgggcatccccatagtctcgaattggtattacctccgcttagcatcgtgattctaaaaaagaacacacgtcggaaaacggatgaatcacctgcgagtataacttccgtcagttcaaaaacgaagaataaaaatgaaagcaacacgctcaaaccgaagaggaggacaaaggcatgaatattctatttgctgctgctgaagtacatccatttatcaaaacaggaggccttgctgacgtaatcggtgctctcccgtttgctttgaagaaaagcggggcagatgtgcgggtgattatgcctaagtacaaggggattcccgatgagtataaagacgcgttacagcccgtaattacaacggatgtgcctcttggctggcgtagaccctattgtggaatagaaatgctggttcatgatgggattccagtctattttgtggataatgagtattattttgggcgtgatggagtgtacggttatatggatgatggcgagcgtttcgccttcttcaaccgtgcagtgctcgaagtgttgccacagattgagttcaagcctgacgtgttgcacagtcatgactggcatgcaggaatgattcctttggtgcttgaagcacactacagacacgatccattctacagtgatattcgtacggtattcaccatacataacttgttgtatcaaggggtattcccgcatgagttattcagtgatatccttgagctggacgatcgatatttcaccgtggatggagccgaatattacggtaatgtcaacttcttgaaagcaggaattgtgtatgctgaccatgtgacaaccgtaagcccaacatacgcacaggaagtgcaaacgtcttattacggatacggcctggacggactgctcagttcacttggagatcgtttcagcgggattgtgaacgggattgataccaagagctacaacccggcaacggacaccaaaattccagtgaaatacagaacaagtctgtccaagaaaacggagaacaaaattgaactgcaaaaggaacttggattgcctgttcgccctgatgtaccactcatggtgatggtgacaaggctcgtggactctaaaggacttgatctggtctgccgtatcttggatgaattgttgtattatgatgatattcaattcgctgtacttggaacaggggagaagtcctatgaacactggttccgtgaagccgcgaatcgttatccacttaaaatgtctgcacagatcaagttcaacgacggattatcccgtcggttttatgcaggtagtgatatcttcctgatgccgtccagattcgaaccgtgtggtattagtcagttactggctctgcggtacggtagtgtgcctctcgtaagggaaacaggcggtctgaacgacactgtgcaggcatataatgaatttattggagaagggaatggtttctcattcacaagctttaacgctcatgacatgatgagtaccattcggcgtgctgaggagatttacaaacagccagaacactggaagaaaattgtgaaaaatgcaatgggcggagaatacagctggaacgtctcagctgaagaatatatggacatttatcgtcggatcacacttgaccctgtaaactgatgcaatcctgaataagtcacagcatatcatgctgtggctttttttaattaaataaagaaaaacacttccaaaagttcagaatgaaagtcatcatctgagacggtggaagtgtttttctttatatatgactatctgaatttaaacctcagttgtgttggatagttgccggatcaagctgtctgtacaaaatgcgatacccataggggtcaagcttaatgttcatcattccatcggctggaaacacaggctcttcagttaatgcatctttccagtcttttgtttccatgggatgagaaagcgttcgatcttgaggtgtattgttcatccatacggtaaagtgaaggttgtcatccacacgctcgtacacgatacagggatcattgtgatccgccttgaggaatcggaagcgtcctttgcgcagggcttcattgcttttgcgtagatcgatcatcagacgatagaaatcatacaattctctgtcttgcttgtccgggtcccattccatacattttcgacaatccgggtcagcatcaccactaatcccaacttcgtcgccgtagaagatacaaggtgtaccgatataggtgaaaagaaatacaaccgacaactttaaacggcgtttgtcttctcctaaccggctgagcagtcgtggggtatcgtggctgcacagcatattaaagatcacttcgttggtttgttgcggatagcgcataatcagtgaacccatctcgttggcaaagttataaccgtccattgaaccacagaagaactgaagcactttgtcggcaaatggataattcatgacggaatcgaattgatctcccataagccaggtcaaggagtcgctccatacttcaccaacaatataggcttcagggttcgctgccttaacgaccttgcgaaaatcacgccagaagtggttgtccacctcatttgctacatccagacgccacccatccagcttaatttccttgatccagtactcagctacatcaagtagatatgccttaacctcagggttggctgtattgaacttgggcatgttgccatagaacccaaatgtatcgtaggttggtataccatccttgatctgaaccggatattcattgatgtggaaccaatcggcatacttagagtttttttcattctggagaacgtcttgaaaaggagggaagtcttcgctgcaatggttaaacaccgcgtcaagcatgacacgtatacccaggcgatgacattcttctgtcaattgtttaagcagggcattatcaccgaaatgggggtcgacttttttataatcaattgtgtcgtatttgtggtaggaattggcctggaataacggggtaaagtaaatggcgttcacgccaagttcagttaagtcatacagatgatccagcacaccttgcagatctccaccaaaataattgtccaactcaggcttgccaccccagtcatgcgtttcttttggattcagcttgggatctccattagcaaaccgttccgtcatgatctgataaaagacggcttctttggcccactcgggcactttaaacacatcaatttcatgtatatacgagaactcataatatcctccagttggatagggggtctcataatgaattccattatccgcaagaaacacatcttctgaaccggcagttatccgaaatatataggtgagacgtttgaattgtggcttgacggccgcctcccaataatcaaacatgttatccgaagcagccttctccaattgaatttccttgtacgttccattccaatcgtacttatctccggtcagtgcagtcacgtattgcacatcattacgtttggttcgtacgcgcagatgtatggtagacgaattataagcataagcccatttgtcacgaggaacatgatacatggcttcgagcagcatgacagcacctcctgaatataggataagttatgaaaaccagtctttttgaacacgcacttatagttataattaaccaagttagccagcaaatgaatcacatttactgtaataaaatgtattattttcagtcattttcaaaggtttctttcacagcatttccagctttgtgctgaatatacttacagctaatttagaaaaaagggtgccctgaacagcttggaattcaagattgttcagggcacccttatataacatgttgaaagtgaattttagcgaatagcttgctcgaactccgtgcggatggtttgaagcagctctggctggctcagtacgtcataggctgttgttgcaagtgccttggctcccagaatcatgccatccagcgcacgctcctgaagtgcaaggtcacggaaggctatggagtgcagtgtatgcacctcgtctacaacacgaatgtagggatgaattgcaggacatttcagggaaacattaccgatgtccatagagccgtgatcattaccactcacaatctcttcttgcgggatcccaagttccatcagattttgactaaacgcagctgagaatgcttcattggtaaccatctcgtcataggacgtttcatagttggatgtcaccagcttgcatcctgtctggagagcagaaccttcagcgatctgaatcacacgttctgtgaggatattcagttctttacgagttgctgcccgtacataaaattgcgcagaagcatagtcaggaattatatttgctgcctgacctccgttgttgatcacaccatgaatccgaacggtgcttttcacttgttgacggaatgcattaatcccgttgaacgtttgaatgacagcatcaagtgcattaataccttcgtgtggacttgcagcggcatgtgaagatcggccatggaattcaaattgcacagcatcaatagccagcgagctgcctgacttttcgtaggcataatacggatgcgccataagggcaacatcacagtcatcgaacaagcctgcttccgccatcggaactttggcaccacgtgtctcttctgcgggtgtaccaaatactttaatcgttccacctacttcatccagaatagattttagcccaacagcggccccaagactcatcatacagatcagatggtgaccacaagcgtgaccgatctccggcaaggcgtcatattcgcacaataaagcaatggtagggcctggtttggcggctgaataggttccgataaaggctgtctccaaaccgaggattggagcctctacagtgaaaccgtggaagagcagttcttctttcaaacgggcagaagcgagatactcttcatttcccagttcggggttggcaccgatatatgatgaaatagctttaaaacgggaagcatattgatcaataaccgtcagaatttgtgatttgttagctgccattagtaaactccttatgcaaaaatgaaaataattcattgattatatcatgtttgcttcattttttcagaaacaagtcaagatttgtattgtcaaaatgcattgcataatcatgcattgtactttataatgactcagtcatcaacatgagaagcatacaaagtattgtaaggggagagaaaaaggttgaaattaataagtcgttacaccatgatgctgttgacctttgttattctgctgacgactgccgttcctgtggcacttgcaagtggaactacagataattcaagcagtaaaaagctggtgctcggtacaagtgccgattttgcaccatacgaattccataaagtgattaatggcaaagatgaaatcgtcggcttcgatattgagatcgccaaagagattgccaaagatcttggcgctgagcttgtgattgaggatatgggcttcgacggtcttctgccttcattgcagagcgggcgtgttgatctggtggtttcaggtatgacgccgacggatgaacggaagaaaagtatcgatttttccgacacttattataaatcaaaacaagtgattatggttcgcaatgtggataaagacaaatatccaaccatggcagaacttgaaaatgcgaagattggcgtgcagaaaggctccattcaggaaacgatcggacagagtattccaggagcgaagcttactgcgctggataaaatctcggatatcgtgcttcaactgcaaacaaaacgcattgacgcggcaatcgttgaagataccgttgctgcaggttatctggacgatatcattgggcttgctgctgctgttccagacgaagagcaagcagaagcggcaatcgggattcgtaaaggtaataccgagctgctagctgcagtaaatggaacactggagcgactgaaaagtgaagataaaatcaatcagatggtgacggacgccagcctcttgatggcggataaagcgaacaaatcacaaaatattttccaagtattctgggagtacaaaagtttctatgctacaggtgtaggatacacacttctgttgtctgcacttggggttatcttcggggtaattattggattgatcatctgtttgttccgtttgcatgacgctgcaatcttgcgctggatcggtacggcttacgttgaagtgatccgtggcacaccgatgttggtacagttgatgattatttactatggtttttctctgagctttggcattaacttcactgcacttcaggcaggtatcattacactttcaatcaatagtggtgcctatctggcggagattttccgtgcaggtatccaaggtgtggatcgtggtcagttggaggcagcgcgttcattaggtatgggaagaggcgccgcgatgcgttatatcatattgccacaagccttcaaagctgtattaccagcgatcggtaatgaattcataactatcatcaaagaatcctccattatctcagttatcggtatggtggatattatgtatcaggcaagtgtagtcaagaacattacgtaccaaggcttgagtccatttttgattgcagcagccatctactttgtaatgacgttcattttgtccaagctgctgggacgactggaaaggaagttgagtgcaagtgatagacgttagacaattacacaaatcttatggaaataacgatgtgcttaagggcattaacgtgacgattggcaaaggtgaggttgtcgtggtcatcggtccttccggttcaggtaaaagtactttcttgcgttgtctgaatctgctggaacagcctacctcaggagagattgattttgaaggcgtgtcaatcacggaccccaagcataacattaacgcaactcgtgagaaaatgggcatggtgttccagcacttcaacctgttcccacacaaaacggtagagcaaaacattacgattgctccaattaaagtgaagaaacaatccactcaggaagcggagaaaatcgccgctgatctgcttaacaccgtgggcttgtacgataaaaaagatacattcccgaatcagctgtctggtggacagaagcagcggatcgccattgctagagcattggccatgcagccgcatgtgatgctgtttgacgagcctacgtcggcactggaccctgagatggtcggcgaagtgctggatgtcatgaaacgtcttgcagaaggcgggatgacgatggtcatcgtaacccatgagatgggttttgcacgtgaagtgggagaccgaatcctgttcatggatggcggggttattgtggaagagggaacacctgatgaggtgtttggagctccaaaaaattcacgtacacgtgattttcttgccaaagtactctaaacgatgtgatcaaatagcgttactgacttcgagtcggtaacgctatttttttatggataataatcacgtatggattcggaaaagtaacttttctgttaccaaatataaagaagtcggttcgccaacttttctgaattaaccagtattcttacaaatgcttacatgctaaaaaccatttggtaagaattactacaagttcaggttacaaaattgtgatatattgaactctgccgaaacttccggacagggagtgcgggggatgtaacgatgcagattgtgcagggggaagatctacggcacactgcttggggtgaattaggggtacataacgtttcaaatgtaacgaagaacctatagggtggctcctcatccgaatccgacaactaacttcgcaggcataatgagggaggaagaccatgattaacaagaaacgtatagccaaaacagcagtagcattaatgacaacagcaatgctcattcaagccgttccggctcacgccgattcagttcatgtggccaaagaaggggataccttctacaccttatcaaaacaatatggagtagcactcaacacgttggttaaagcaaacaacgatatttcggcttacaatatttatggtggtttgaaaattacgattcccggtaaggcaaacaatgtagcagccgctgcggcaacgcagagcaaggcccaagccaagactgttactacagcgagcttggacgttaacgcagataacaaagttgttcaagcttggggtaagacattcgattacagcaaagctgtgaacgtaaaagcaacggcatactctgcagatccgtctgaaaatggaggatggggtgcagtcgattatttcggaaatgaccttgaactgggtacgattgcagttgatccaagtgtaattccactcggaaccaaagtactggtaactggtcacagccatccaggattgccaaaacaagcttttgtagccacagcacgtgatgtgggcggtgcaatcaagggtcaccggattgatatctttatcccgggtagcaaacagtctgtaagttcatttggttttcaggatatcgagctgtacattctgaagtagagagaaaataacatttaaaatgaattcaaacagggtgtctgccagtcgctaaatttgcgattgaacagcacccttttaatattctcatttattttctatcacgttcatcttaatctttggcctttggcaatcccaacatttcgtccaaggtgaccagttcatatccccgattacgcaattccttaatgatttcaggcaaagcctcaatcgtgccgttcaggtttgatcctacaccgcctccagcatgttgcagaacgatggagccaggttttacggcggacaggatgttatctttcacctgttcctttgaaaggcctttccagtccagggagtctacgttccagttcacaatgctatagtgttgtttggcagcccatctcagctgttcttcattaatgtctccataaggtggccgaatcatcttgggcgtatatcccgccaaacgtcgaataatatccccggtatgtaaaatttgtttgcgaaaggcattcatcgacagcttactgaattcaggatgattgtagctgtgattaccaaccatatgcccttccttaacaatgcgtttcactagatccggatgtttctcagcacgactacccacgatgaagaatgtagctctgacattgtatttcttcaatacatccagtacttgtggagtaaatcgtggatcaggtacatcatcaaaagtcagtgcaaccttctttgttgaaggaccattggttttgaacgtatcggcatatttttgacgtaattgtcccaatgtcagttgttcttctttcgcagaatccgaacctgatactgattcacttggcgggcttgaaacatcccgcgatgaaactggagcatgatatcctccgagaaaaataacgataaccattagcataatgaggcgtacgcgcataataacggcctccttttccaaaatgacgttctccttggtatgcccgggagctccataaaatatgcgcagtgtgagaagtttcattgccgatttagctcatgacagccataattcctccatatataacatatagaaaaggataggtggatgggtatgagtacatatgatttgaaatccatacgtttacaggtgattgaagcaggagaagataaggtttttctcgttaccggaggaaaggcgcatattggcgccgtagccacgttctacgtggatcatgagcgcgtaagcgggacgacagtccatattcctgggcataaagaacaagagctgtgtgagcggcttgcccgaaaggctgccttgcagctgaaagtaaccgttacggtgatcatgggtatccattttgattccatcacgcggatgcagatcgacgaaatcgtgcagactgcagagaggttgatggaggatcatctgaacaaagataaacgatcttcctgacataagagccatcgaatgttttgattttatttgctaaaattgaaacgagttgtagattgttacgtatgtatgtttatatacgatgtaatatcgactaggaggaataacataatgtccattttcaaacgtttgcgtgatctaaccatgtctaacatcaacgccattattgacaaggcggaagatccaatcaagatgacggaccaatatatccgtgacatgcaagaggatctggaagatgcggagaaagcagtagctcaacagatcgccattgagaagaaattcaagcagttattcgaagagcaggaagctcttgtgaagaaacgtgaagagcaggcgcatacggcggcacgtgctcagaatctggatttggctcgacgtgccctggaagagaaaaaggctgctgaagagaagatggctgagtacaaaaccagctatgaccaaaacaaggcttctgcagataacctgcgtggcaagcttgacgaaatgcgtaagcagttgactcaaatgaagaacaaacgtgaaacactggtagcccgttacaatgcagcaaaagcccaaacggaaatcaacaaagcgttgaatgggtttggctctgatactgcaagtgctggtatgaagcgtatggaagagaaaatgatgcagatggaagcacaggccgaagcaagtaacgaaatgtcttccaaaggaaaatctttggatgaagagttcgagaagttgggtaaagatcaggctgttgaagatgaactcgcagcattgatgaaacagtacgataataagaactaataccttggttgtcagcaaggttaaccagcggaggagaagagtatttctccttcgcttttaaatgcggttcatgttgatatgtgggggctgtgtaaatggatttgaacattttggcgatgctggtctggaccggatctggttcggttttgctgtttgtcctgatgtatgttgattcactgttcacgaaatataaggattttgctgaagttaaggctggcaatatggccgttactacacgtatggttatgaaattatttgcacaaggatatgtactcgctacgtccatttctacggccggtcacctgggagaagcactgctggtctccgttgtatcctttatcattttgttgattctggagagtgttgtacactttatgattcgcaaatgggccaatctggatctggatacgggaattcagcaagggaagacagggtacgggttgttctctggcgctttacatatcgtgggcgcactgattattgcagcttgtttataagataaggaacaggagtaattctcatgagtgtatggaaacgaattaaaggaatactaacgaaacctgaaccaccgcaggcagagaaaacgatgcttcagcttgcacctggtgatatctgtgaggtttctctggtcacttatgaagtcgttggtggggtacaaaatcgtgctcgaaatgcagttgtgctcacgctacaggatggtaccgcatttcgatatttgcatatcgaagaacgggaactcacacgttacgccctatatacaccaattgatggcaggcttgatgcgcctgatgaggtgcctacattgctggacctggatggacgcgcatatcatctggaggaagagtatggaggcatggtatcaacggcaggtagaactccatatggccaggctggagaacaattggtatggcagtatcagtcggatgataatatgcttcttcgcgtggagtggcaagacagaagatttacactgtatgagggtgagtccattcttcctgcggatatcaaagtgattcgttcgagctaggagaggttccaatgaaaaaacgcttggcacatggattaaaattaatgctggtcctcagccttgtcatgtctctgttgtccgcgtgcggagcagcaccttctgttcaggacacatatccgcttgaatcggttaacggcagtggtaactcaacgtcctatgtgtaccgggcttcggaccgtaccgttccggaagtggcgcaggaattgtcagaccagcggcaaccggatcagatctcggcagagaacacagagcgtatgttcctcgtgtatcaggacgagtattatcacctgcaacaagacccgaacaagccggaggataccttggttgaggtggactccaaagaatatgttcggcagaattacgattcatcttttttacaaggttacctcaccgctacattaattggtaatctgttcgattcttttggcgggcgaggttatggcaactatcggggatacaccaataaagatacgtataaaccgagtgcaggatcttatcgtgcaccaacaagtaatgacaagaagcttgctccacctattactgttgatcggaaaggtacgattacaaggcgcggaagcgataaagattcaagcgtgggatctggcggaggattattcaaccgcaacaaggatcagagcaagggaaccattgatcgcaacaagagcagtggtgggctgtttgattcacctaagaaatcctacaaaaaaccaaaaaccagagtgggcggcggccgaattaagaggcgaagataatgatttaattataagcttggctgcccaacatatagttcaatccaaaaagaacaggaaaaggtatgacggatttatctctatccgcgcatttaccttggagctgttcttttttctttacgatttgcgaacatgattggacttgcgtacgcggggaatcgttgtagcaggctgtttgcgaatccagcggataaatggaatcattcgttcatcctgtctcaaggattgcagatcagtgagaccaagggttacaatgtcgcgattggtgtatagcgaatgaatctgtttgtgacaggggatgcacaggttggccgttggtagaaatgttccgcccatttctttgggtgtcagatgatgaacggtcgtattcacaggttctctttcgcataattcacatcgattactcatgatcatcgcctccctctgtcacttatattatgggcagacaagatgcctttcatgttgaatatatctcaaggaatcttacaactgtaagaaataagattttgtcacaggatcaataagtgatgtacttgttatcttacagtattcgggctacactttcttaaaggatgatagtctttaggaggtaagaatacttttgaaaatgaactcacattcacatgatatgacaactgccaaattcaatcgtacagctgtacaggtaccggatgcccaggccaaaatagctgcaagagttactgtaggctccatagagaaagttcatcttgaatctgctcatggccgcacacttgcagagacgattcaggcaccccatccgtatccattcttccggagatcgggtatggatggattcgcgattatcagtacagataccatagatgcatcgagtgatcatcaagtttggtttcgagtcattgatgaaattccttgcggctacacctcggatcacaccattgtttcaggtacgacggctcgcatcatgaccggtgcacaggttccggaaggtgcggatgcggtagttatgatggagatgaccgagagcaaggtagagaatggagaacagtggattgcattgaaacggcacatattgtcgggtgctaatatcaccccaatcggactggaagtccaagagggacagcaactgctcgaagcaggaacgatcatcagggcaggagagcagtccgtgttagctacttttggcatagcagaagttcctgtatttaaacgtccaaaggtggcgatattcgcaaccggcacggaattgcttgatgtagatgagccattacaaccaggtcggattcggaatagcaacagttacatgctgcgctctctggttgtagaggcaggtggagagcctgtgatgtacggttctattgcagacgatgtgaatacggcaagggccaaactggaagaagccattcaagataatgatatcgtggtgaccacaggcggagtatccgtcggggattatgatattatgggcgaacttgtgcttgaagaacatgtggagatgttgtttaacaaagtgacgatgagaccaggcagtgtgaccacagctgctatatataaagataaattgctttttgcgctttcgggtaacccgggggcttgttttgtaggttttggtttgtttgttcgtccaaccatacgttccatgcaggcggatgctcatccttatatggaagaatggaccgcgatcttggaagaagagtacaccaaagtaaacaattttacacggttcgtacgtggacgcacagagatccgcaacggcatggtgtacgcaataccggctgccgcccgtgtagatgaatccagtgtgatgatcaccattaaggacagtgattgcctgattgttgttccacctgagaaaaaaggcattcctgcgggtgagcaggtacgtattctcaaactgccctcaggtcatgtgaggtagtggtagatgactacaatcagtgatacaaagccacatatcatacagattgttggatacaaaaacacgggtaagacaaccctgacagccgcgttgatcgggcacttttcttctatgggacttaaagtagcggcaattaagcatgatggacatgaccattttgagatggatcaagaaggaacggattcgtatcgatttggagaggctggggcctcggcggtggttgtcatgtcagagaaacgtactgcgattatggagcgacaggcaaccaagctggaggatatgttaattcatctgtccggttataattggattattgttgaaggattcaaggatgcttcttatcccaaatttgtgatggttcgagaagagaaagatctgaccttggttgatcagcttgaaggggtagtgggtataatctcatggttaccttcagagcagtttatagagcgaagcactgtaagcagagatacatggtattcggttcatgaaacggaggatatagccaaagcgttgttagcgatggttgagagcgagtgtaggcagaatggtgaagtttaatcgtagaaacgttaaaaaagtaggatattatgatcgctggatatgattgaatgtacagagagcgtgattgattcttttttaaatataacgtaatatttattatgtaaactataattatttctgattatgctcttctccttgaatgatgcaaaaaaaacaaaaaagcagcagacctttctcggatcgaaatccttgatgcggtttgctgcttttattatgttcgggatgttacatcccttcgtcggtacgacgttcgatggcttcggacatcgttttgtcggtaaggtgagcatagatctcggttgtttccgtagaagcgtgtccaagctgctccttcgttttgtaaatatcattttgcaaataatagtcggttgcgaatgaatggcgtaatttgtgcacggtcaagaatggtttgccaaaacgtttggcgtatttcatgatcatcgcctggatcgctcttttggtcattcgactgccttctgaatctccgttacgcaaagcaatgaacagacctttctcccgcttgggcgtacggtaacgtgattgccgcaggttcatataagttgtgagttcgtccttggcctgttccctgaaataaacgggtgttttgtacgtctcatcattgttacctttgcgataaacatacaggagtttgttgttcagatcgagatcatcgacgttcaggttcacaacttccgacactcgtaaacctgaatttagaatcaggctggcaatgcaggcgtcccgttctttgttgagctcatgggaatagagtgcctgcttgttcttctccatatcgacagcgtaaccttcaagaatatagccgataaattccagtaattcctcttcctccaggattttacctttgagtttggcagcggtgtccttgggtttatgggtacgcttgatctcgattttggccattatgttccgcttcagcaaaggataaaagtcttcatcttccgcaatttggctcaggtaatgaaaaagcgagcgaagggaagagagtttgcgagatacggtaattctggaattggttccttctcgtttggttgtgagaaataaccgataggcggtaactgaatccatgcgaaggacttccagttcagtcaaggtaacttctttattagagcttgcctcggacaacccttctgctcgcaaccatccgaagaaagcttcgtaatctctcagatattcgagcagggtagagggggacaggtcaggcagcttgtagtccatgaattgctgaacgaaccaaggcatggaaggtagtttgtcatccagcttgcgtcgatcaatctctttttgcacgttggtcaagtgcgacacctccatgtgaaaaacatataagattaatgttcaatttaatagtattctatgctctagtgtaccataatttacatgctcacagcttgttcaccaaagcaggcagtaagtagggtatgcttccttgcccttcggcgcgtaaacctttaaagtaattagtatacgtaaagcagaggaggtgaaccggatgaatatgaaaatagaactggttccccgggaacgcagtcaggtgattcggcatttaatgcaattttatttatatgattttaccaaatacctgaatattgatgtggacagtaacggcatttttccggaatatcccggtctggaggcattctgggcagaaaaggaccgcaagtttccttttttgattacaagtgatggggcacctgcagggtttgctctggtggagaaattggagcctggtagtaaggataatgactactatttgactgagttttttgtgatgcaaaaatatcggcgtagtggggtgggcactcgggcagcctacgagctgttcaaacgttttccaggaagatggaaagtgacccaggttcgtaacaatgttattgcgcaggcgttctggcgaaaaattataggggattataccggaggccgctttcgagaaaagttccatccggaactgggcaatccaagccagtattttgtaacctgattcccatcggggtttacctacatatagaagcatttgcatgattgcgatataagttgaactaatcatttacacgataacggagaggacagaaaaaacctgaaaaagcgaagcgttcgcctaaaagctttctgaaagaaagctgcatcggaagcatacgctatccccggattttccccttcagaaaagggaatcaaaaaatctggggataacagcgattggaaggttattctgtcatcgtagtgtcagtgtaaataatctttagttcaacttataaatctgatgaaggagtgagtgacatgaacgtacccacattccatctcgatggacagacagcactggtgacaggtgcagggagagggatcggaaaagcaattgcgattggacttgcccagtcaggcagtgacgttgtacttgtatcccgaacgatgaaagaaattgaggagacagcagcctacatctatgaacagacagggcgtaaagcgctcgctctgactgcggatgtgacatcaaaagaacaaatggaagagacgtttcaagaggcgatctcggagatgggtagcctggacattctggtgaataacgcaggtatgaacatacggacaccagcacttgaagtaacagacgagcagtgggagaccatcatgcagacaaacttaaaatcggctttcttcgcttcgcaattggcgggtcagcatatgaaagaacgtgggactgggaagatcattaacatctcttccgtaggtgggcatacggctttgcggacaggggttgtatatggtgcgaccaaagctgcattaattcatatgaccaaagttctcgcactggaatggggcaagtatggaatccgtgtcaattcagtagggccatggtatttccgaacacctttgactgaaaagctgctggatgatccccattatttgcaggaaattgtaagccgtacaccgctacagcgagtgggagaactggaagaagtggtagggccggttgtattcctggcatcagatgcagcgggatacataacgggtcagacgttattggttgacggtggaatgtccatttatggcttttaaataaatgaagttggttgcagtttggaaaagtgggtggcataaccaaatcatgggtaataacataagggaagttgaagttaatctgtatttctatttatctgtacccaattcactgaacttggaggaagataaccatggaaacgcgcaagtacggtaatactggcatgaacgtaagtacacttggatttggcggagcggaaataggaaaaaatgtatccaaaacggatgtagcgacattgctgaatagtgccctggatgctggattaaacgtgatagacacggctgaatgttacggtgacagcgaggaattaatcggagaggtgttgtcacatcggcgtgatgactactatttgttcaccaaatgtggacatgctgccgggatcgaaggtccggattgggatgccaaagtactggagcaaacgattgaccgcagtctgaaaaggctgaaaacggactatgtggatgttatccatttgcatagctgctccgaagaagtactccgacaaggagcagtgatcgaagtgctacagcgtgccaaggaatcaggtaagaccaggtttatcggatacagtggggatacaacagatgcgctatatgcgattcagaccggagtatttgacagcctggagacttcattaaatatcgcagatcaggaagcagttgatcttacgttgcctgaggcaagaaaaagaaacatgggtgtcatcgccaaaagaccaattgccaatgcggcctggacgtatgatacacttttagaagatgcttatccatttatatactggaagcgcttaagtgaactgaactatggttttctgggtgaagatgcccaggtagcggtggaaacagcactgcgttttacgctaagtaccgaaggtgtagacacagctattgtaggaacagccaagcccaatcgctggcagcaaaatgctgatcttgtggctaaagggcaacttccacaggaattgtatgatgaaattagagcacgatggaaagaaatcgccggagcagattggactggccggacttaaatcagaaatattagcgaagtcgccatatggcggcttttttatgaccaacataaaatattttcaacatatgaaaaattcacaacaactttcggatcaggggttgcgaaaaattttagagaacaatacctatacgtcagcttagttcgaaacgggtgacaaaggatgaaagaggaaaaatcacaggaaatagcccttcttataaacaactaaatttataaaaaaacgataaagctattgagataatacaaaaaataggcagtctgcgttcgagataatagaaataacgacttaatttataaaatttcaacatatgaaaaattcataatagaaagatcattttctcaccttagttactatctctcatacagccacattgacgcaccaccaagtttaaaaggaaaaccatcctaagcgattgaagtcaaccactttttttgcgaatttaaatcaaattgaaaatatatctttatgaatgatgcctaaaagcatgtagcttaaattcatcatcagaatgattttaacatattaattattatgtaaaccaataacaattcttttggcaatacagacataaaacctccatgacctgtaaatcgtaaggggataaggcagaaggaggagcttcatgaaaagtcagcaacaccgtaaaaacgacgacgaaaaattaagttgggtcagcctatccttgtttggcgcgggttgcacactgggaacgggattttttctaggaaccagtctggcgattcattgggccggaatatctgtacttatattgttggtgctggcggcggcaggtacatactttgtatttggtgcgctggcacagatgacggcagatgatccaaaggaaggcgcttttcgaacgtatgcgggcgaagcattcggaccttgggctggtttcggtagtggatggatgtactggttctctgaaatgctcatcatgggcagctcattaacggcacttgggctgttctctcaattctggtttcccaagtttccgctttgggcatttgttgcggtctatgccgctataggtctgttcattgctgcactgggagcgaagggattaaccaaaacagagaatattcttgctgtaatcaaacttgctgcaacggttgcatttatagctatagcaggagcggcttgtctgggttggttacctgtaaaagtaacaccagagcaattgaagaatgaatggttcccgcatggaggtaaaggggtatggaccggtttcatctatgcattctttgcttttgccgggatcgaggttatgggtttgatggctgctaacctgaaagaacccaaagatgcagtgaaatcaggtcgagtaatgttattatcggtgagtacactctatttgattgcaattgctttgatcctgttgcttgtgccttccgctcagttgactccagatgaaagtccgcttgtcaaggccatgtcaaccattggattcaccgttgtggtccacattctcaacggagttctgattattgccggattctcaacgatggtggcttcgatatatgccattacgtccatgttggtgaaactcgcagaagatggagatgcaccaaagctgttcacgaagacctggggaaaaaaggacatgccactccaggcgttgtgttgcacagcggctggattagtcctgtctacgttgatggcattatggatgcccaagagtttgtttgaatatgtgacgacagcaggtagtctggtattaatgtatacatggctgctcatctgcatcacgtacattaaaaaaatgaagcccgtgaagtggaatcgcatcaaagtgtggattgccatagtattaattgtggctgctgtggcagggacagcgatggaaaaagccagcagaacgggtctgctggcaagtgtgggacttttggtgttccttgggatcatcacgtatgttgttcataaggtacgtggctcgaaaccaccgcagtcagcaccatccaaaccataagtacctttcagcaactttcgtggaggtcgcacaacggattaatgagtgctttaagattatttcgtcaacttgcctatggcttgcttcatccgcatgaatggacatttggaaggtgtctgctcatcatcaggaaggaaatactgtttccattccagattatcttgctgaccataccacatcagcgaagggtgagcaggtacagcatcatacgcagcgagacgtttgcgaatcaaggttttcattttacggccaagaggggtgttgtcattaatggattcgaatacccaccgtggttgaaaagcaaacatgagataaggaaaatgccggctggctcggagttcatgtgcaggagttgcacagaaacaaaaataaggctctccgccaaagcaaaactcccatgatgaatcatgaggatcggttgaaatatgttccggccacggctcggtatcgtgtgaacttacccgattaagcatttgccagaataaggtctgatattgctctaccgttgtatgatctttcagatcacttggtgtctcacagatcacgaccatggaagcataatgaccggtgtctctggatacaggaccatattgtctaagcagatcggccatatcttcagcagcatgttcagatcgggggtcgcacgtaaagccgtacctcaaatgtccggacagaaatcccattcgtccaggtacacatggatacgtattattttcatcggcgatcatatctgcaaattgcgaataagcgtcctgctgccaagatggaagacgctcaaacaaggtattaatttcgtcggcactatacagctccgccattgattcccaactccattccacatgataccgttacagtattaatgtgggggaagttgggtgactgtccagcctgattttgttgtcagaaaaaaatggaacgcacagcttcgtacccaaagtacaaaccaaatccgatcaggcagattcccgaaatgatggagatccagcgtaatacattttcactgctatgtttatggaatcgactggccatgccagccataatgacatcccacaccaggataccaatgaatatgcctgaactgtagagcagcaaatgagcggtatccgtatgtttcacagttgtcgcgagaatagagccatagatcccaagccaaaacaaaatattcagtggattggacagtgccatcaaaaagccggatataaacgattttcgaacagtcgcttccgcagtagatgtaccttgaatgccttgctttagcttcgagagcgtttccactcccgtgtaaatcagaataaaactaccaaatgaccagagaaaagagcgcataaacggcgtgtccagaaaatgggcaactccaaaataaatcagcagcatatacaccaaatccgcaaacatggcgccgagccccaaaatccaggcatgcatgaatccatgtcgagctccacggtcgagttgggcggcgttaatcggaccgattggagcagacaatgatattcccagaataatataactgaacagtacagacataaacacgttcactccttaacgggttcgatgaattgtaccagtcgtcacagaaaatgggtacaagtcatcgtattcccgcaaggagtgaattagaacaaactacttttatctcatactgcgtcatggccttgttattctgttaaagttccacatccaattgaattggggtgcagttgtacccgttgcatgagctttcttcacaaggacaagcggagagcccaattgtgagatcgattagtgcctccatctcgatataatcacctgcacgagagtcgggagctacaacatcaatcttgccttcactgtctacaacggacttcataaacaggttaaatggatagtgttgatctggtggtagaatcccgtagggttccagtgccgtgttcagattatgataacaactagcgtgatcctttttatcgtataacacctcatacatctcaggacgacaagcggagttaaagaaatcatgtaccccaacggtgtcacggacaatcttaagtaatggttgatactgattggaatatacaaattgtcctggtttaattcgataagtacgcaatacgtccattgtcacgccgggatccaagcgatggttagcatccgtagcatcgtatgccacaaaatcaatgacttgctgtccctctagatccgttatgcgtagtaaagaacccttgcttactttcaaggcatatcccgttttggctgggatacgataagactgtttatggcgctgattcgtattcatccgtcacattcctccgctactttttgttttcagtatgcggagcagatgaagctttcatgcactgttatggcgacgtactgtactcaggcaagaacatccaatggtgaatttttaaaaaaaccaaattatacgcctttatgctggaaacagtggattacctctcattccaatccagaggtctgattgttcaagctgtccagccagatgtaataaccaatcttcacgtcccttggttgccatcacttgaacgcccattggcaaaccttcaggtgtcatatgcagaggtacacttatcgcaggctgacctgtcagattcgcaagctgggtgaacggtgtatacgtaagacttggctcaaacatttcatagatgagttgctgctgctgggtcttgtccaattcactaatccgcattaggttacgaatctgttcgtcatgaggcgttaattcaccaatcttaggcgcaggaaaagcattaacaggtgtgacgtagaagtcataacgctcgaacaaagtggacatctgggctgcagctacatcccattcagctaagctatgtacaaattccgcagcggacacctttttgcctgcttcagccagaacccaagattcaatctccatatcatcggaggtcagagcccggcccatggatcgttccatggaagagatcatcgcagccatctcaccgctgttcatcatgtaatagttctccatcaaccgaactccattgactggactcagtttttcttcaacatgatgaccttgatcttccaaccagcgaacgagcttgtatacagactctttggcttctgcgctgacaggtgttcccacgggtgaatccgttgtgtatgcaattttcagtttgcgttgatgtggatagctcatgtcagccaagtaactgcctggaaaaagtggagcatggaacgcagcttcgggctgaatgacttgtaacgtatcaagcaatgcagcactgtcccgaactgagcgagagagggcaaaatcaatcgatgcgccttgccattgacgaccaactcccggtcctacaggtgtgcgcccgcgggttggcttcaatccaaacaatccgctaaaggaagccgggatacgaatcgaacctcctccgtcactggctccggcaagaggaacaatacccgaagctacagcggcagcggcaccaccacttgaaccacctggggagtgattgatattccatggattgcgagttggaccatgaagacggggctcggtaatattttttaaaccaaattcaggcgtattggtatgtcctatgaagagaaagcctgcatcacggagtcgagtgacaaaattggaattgcgtaatgcccgatgctcgctgaacaaacgggagcctgaagtcagaaattcgccttccaaggattgagagatatctttcaggagcaggggcacaccggcaaaaggttgttctccagggcgaaccaagccagcctcctcacgtgcgcgagattcatatgtacgaataaccgcattaagttgcggattcacttcttcaaggcgtgcaaacgccgcttcaagcatttcaaccggggatacttcccgggatcggatcagttcagccaaacctacggcgtcgtaggaggtatatgagaatgaagacattatgatcgttcctctctgaatataattcatctgtttattccatatgtcatcgtaccaccggattagacaaaagacaaaacatagaagaatcgtagtgcgatgatatggatattcgttatgaggttggagggaaagaggggagtatttgcatttgcgatatagaaataaagcacagggttaatagttcatattgctaattgagaaaatgaacgagtaatatcgagtcatggaaataaaaaaccactgctcatctaatttgatgtgcaatggttttattttatatttgactatttgtttatatgtgaacctcagatatatctacttattctgtacgcagctttggtgcagcatcggccgcagttgatgatctttcctgctgtctggaaatggcgaagagggccacccagatcagaataaaaccaagcagctgctcccatgtaatcagtgtacggaaagcaatccagttcaccaacacacccgccatcgggaagctgagttccgcgagagttgcaacagatgctttggttgacgacagacctttgtaatacaacagaagactgagcaaacctggtaacaatgcctgaccgagaatgttgaggatgacagcagtctgttcacccgttccggacggaaacgtccatgccgcaccttcgttccacgtcataaagatcaggagcgggagagcaacgacaaagcgaagggaagtgacggtttcgtaacgcgcctgacccagcatcaatcttcccataacggttgaacctccccataaggcagcggccccaagggataacaagcttccagcatgaatccagttgtcccagttacctaatggcaatgtgaagccaaatgtaagcaggtacgttcctgctaatgcaatgaagaacaatccaccgaagcgacgtggcaacgtttcttttaataacagtttagccagcacgatagcgaagagtggttgcattttttgcaataaaagcaccgtgttcggatcgttatgtgttagtgccatggtgaacaataccgttgcgagtgctgatcctccccatgagataaaaatcacggcaatccagtggcgagcgcgcaggtttttcaggtcagaccggaatttccacagcacgggaatggcaataagactgacgatgatatgttccaccagtacaatctgtgtggatgtcatcgtgtttagcaaaataattcggaagagtgggtcgaccccccataaggcggcgccgagaactacaagccagaatccggtattacttcgttccttgcggtaaacaggtgatgctgctgatgtcttttccatattcaggactccttcgtcagaacacggaatcttcagttggcaaaatcgacaaaagcccccgttttggtatataccaaataaacgggggctcatccaaggacatgcgtcaggaaagaggccttcccgtgaacggcatgtcaatgtgttgatcttctctcatccggactgtaccgtcggccttggattcacaccaagtcagtcgctgaatgtccttcgttaagaacaattagcgagtcgcgggctggttccgaagaacatcaccgccggttgggaattgcaccctaccccgaagatcctattcaattatatagtgtgttgaacaagctgtaacattaataagttcatcttattcctgtaagcgctagcagttcaagcattttttttagaaaacgattttccagcttccttgctgtctgcgaaggagcacgatctgacctgcgtgatacgcatcatggagtacccagcgagctagttcgtgtgcccatttctcttcggagtccatatatgcggcttcaagatcagactcttgtagtgcagctaattgatctcgcaactgctgggctaatcgagttgtaccctgcatcagtgtattccaaccagctgcatccgttgcatctcccggattaccaaatgtgtattcattggagtctacagcaggaagggtaggctccttaccttgcatgcgacataataagcgatggttgtaataatacatatggttaaccaactgccagatgcttaatcctcctgagggtggaatccaggctgcttgttctgctgtaagaccttccaaggatttcgacaaaggtacaatccaattacattgatcccaagtatcatccttttgaataagtaacacatctagtgctgttgtttttgtcattgccttttcctccttgcgtataattgtgataggtgatgtaactagctaaaactgattaataaggttacactcaatataacacatcaaagatgagttgtaaccttttttatttaattagatggttacattgaacggaggtatatatggacaggttatggaccgattttgtaaacagcgattatcacgactggcgtgggggagatcgatcggaggacagactcgggaaggcgagctggcagcgagattttctggaacgatggcaacttaacgcttctgtccctgcatctccagaagatgagttgtcgatgagaaatttcaggaatgaattgatagctcttggagcccgcttgtcttctggagcattattaacagatgtagaaaaacaatggttgaacgacgttatggaagcagggcatgtgagaagaaaattgaatacaattgatcaggaactgaaactccaactgatagctgtggaagcgcattggcatcaggttatagctgaggtagctgctgactttgctttgactttggtagagggagaaggcggcaggatccggatctgtgataattcggattgtcgctggatgttctatgatgatacccgaagcagaacacagaagtactgtgatgataagatgtgtggcaatctgatgaaggttagaagatttcgggcaaaacgcaaatcccaaaattgataaatactaacaataactatataatgtatatatactagcgaaaaaatagtcagaagcagtacggattcgtaagcaggatgtgatcgtctttcaaaccaaaatagatgggagatgtttcttgtgcggacaagttatctgttgaaaaatggctgtgtgttgtcgatggatgctaaaattggacagtataagagggcggacgttctgattcaggattcactaatcatggctattcagcccgacctggatattccggatgcggagatcattgatgcttcatcgatgattattatgcctgggctggtggacacacatcggcatatgtgggaatcacttgtcaaaacagcgggaaccaactggtcgttaccagtttatttgcaaaatctctattatggtgcgatgggaagcaagctccgcccacaagatagttatattgccaatctgctcggttccttggaagcgcttaacgcaggagtgacgacagtaatggattggagcatgccgtattcccctgaccatacggatgaactgattcgtggacttcaggatgctggcattcgggcggtatttgctcacggagtacctggtgagacggactactggaatcgggatagtcaactcacgtattcgaataatgatgtgagaagagtcaccgaacgttatttttcatcacgggatcaattacttacttatgggcttgccattcgtggtccggagttcagtcattgggatacaaccgtgaaagagatcgagctagcaaaagaactggatgcgatctgttccatgcatgccggatttggcagttggggatctgtggatcgctcgatcagtcacttgtacgaagcgggactcttaagtccacgggtgaatatcgttcatggtaacaccatgggcatggatgaatacaaaatgctggcagatagcggcgcttccttgtcggtcacacctgaggttgaaatgatgatgggtcatggatatccggccactggctattttcttgaacatgggggaacccctacacttggtgtagatgtggtgacgtccacaggcggagatatgttctcgcagatgaagtttgcacttcaagctgaacgatccagagccaatgaacaacttttgcagcagggtgagatgcctggtgagttgaacttgcagtccagccaagtactgagatttgcaacttcagctggtgcccaagcattgggattggagcagaaggtgggtacgttgaccccagggaaagaagcggatctgatcatgattcgtaccaccgatctgaatatgttccccgttcatgatccaatcggcgctgttgtgcaatttgccaatccatccaacgtggatacggtctttgtggcaggtagactcgtgaagcgagagggtaaactgttgaatgttgatctggatgcgattcgtcatgcagcgatgcaaagcaaagattatttgttaacccaatacaggatgtcagatgcagagagaattgctttctcataatttactttttcatagaaacctgaaatgaagtcagtttgtatttttatatacaattctacctatagtaagaaatgaagggccgcataatgatatgtggctcttttacatgccttcatatcgtcgaattagacaggataagggaggaagatacagcggaaaaagacgaaaagagctctctttttcttaacttcagataacaaggaactaaagatgtttttggcggaaaattaggctcataaaaactgcgcataatataaattatacgcagttttgttttaaatccattttcatattcaaccacgtgcaacagatcatgataaatttcgcggaaaaagaacaaaataagtgatctccaaaaataaatttaaccaagcaacgcgataacgtgtagaattcgataggtttttataggtgatcgataagatagaacaaatgactttttcatagaacagatgggaagccatccaatcgctgctacatccatagcacatttaagattcatgacgagaggaacatgactatgcgtgagaacaaacaacgatcttcattatttcgtaaaaaaccaattgcctcggagggcgataacagcagtgcattgaaacgggcgctcggtccgttggacttaaccacacttggcgtaggagctattattggtacggggatttttgtgctgaccggtgtagctgccgcaacttatgctggccctggccttgtactgtcatttttgctggcaggtatcatatgtgcattcgcagcattgtgttactcggaatttgcctcaagcataccggcctcgggtagtgcgtacacgtatagctatacggcttttggagaagtgattgcctgggttctgggatgggatctgatattggagtatggattcgcgagtgcggcggtagccagtgggtggtctggatactttcaaacgttgttgtccggattcgggctggagttaccacatgcgctgacgagtgcgttcagcccggaaaagggaacctattttgacatcacagctgcggtcattacgttaattatcactttcctgcttacccgaggggtgaaggaagctgctcgtgcgaacggcatcatggtagcgattaaaattatcgtggtgctgatcttcattggtgtaggtgttttctatgtagagccaaccaactggcagccatttttgccttttggtatctcaggcgtaacagctggagcagcgacggtattttttgcctacatcggttttgatgcggtctccacagcggcagaagaagttaagcagccacaacgggatttgccgatcggaattattgcgtcactggcaatctgtaccgttctctacattgttgtatcattgatcctcacagggattgtgccttataacatgttgaatgtaagtgatccggttgcgtttgcatttgaatatgtccaactgaagggattgtcctggattgtatctcttggagcgattgccggcattacgaccgtattgctggttatgatgtatggtcagacacgtctgctctattccatgtctcgtgacggactgctgtcaccggtcttttccaaggttagtggcaaaagtcagacaccagcggtagggacatgggttgcaggcattatcgtggctctgttctccgggttcatctcgttgggacatttggcggagcttacgaacatcggaacgttgtttgcttttgcagttgtaagtctgggcattattgtgttgcgtaaaaataacccggatctcaaacgcggattccgcgttccacttgtgccactgattccgattctgagtgccctgggttgtgtatacttgatgacacgccttgcagcgctgacatggattacgttttttgcttggttgatcatcggattgatcatctactttgtgtatggacggcattacagtcatctgaatccggcacgccggatctcgagtgctctcagagcgaaggataaatagattagttgagaacgtctttaaccgagaaaatcttcatttttcctcattacgtatcgcttaggcgaagcgggatggggatttttttatatagaaagataaaggaagataacagcaggggaaggttggaattttcttcatatatgggtaagtaataaggggcgtgacaaatttaatcaaggagccggggttgcggctaagtcaaatatgaaatatatttggggatgtgacatgccatcagacataagagaggggatgtatcatgaacacaccattacatacgaattcaaatcatcaaaatgcagcttttggatttgccttggctgactcatccgtacttgcagaggcacaattagttgtttcacaatcaggaggtgcaggtgacctacagttagatattgatccgcagcgccttctgaaggatggacgtaaagtatctgtcattgcacaacagttcgattcaccggtcaatcgtcaggatgccaatatcatctatggtcaggagctggcatacgtgcagtatgctgttaacctgaaaccggatagctcaatctccattgcatctattgaaggcgttgaacagtctgttaatcttggttgggaagcatttcaagagggggaatacgaacttcgaatctccctgcatatgaaaacacctcgtattgctgaaggtacactcgaacctgaacaacttgcaatggttaagtatgcgcaagttatcaccgtatatatatcgcttttcccggcagaagcagcgtcgttgagttcaccgtctcaagctgtgtggagcagaaaccatcatgtgtttgactcctacgggagaggaggatttattctcgctgacctgcctcgactcgctgaacgtgtagaggcactgatgggaccgggtaaccataatctgatcgagcaatttgccgaagggaatctgtcagatacgttgctggaagaggggctgatggcgatttcctggggcgtgactccgtggtgttattcactctattctgcaccagatgagcagtctgctcgaatactcgccgtggacaagctgggcgatgaacctgaacggcaagggatctaccatctcgatccgtccattcaacaattaagtatcgtacctgcgaatgagctagcttactggcctgcctgcgttcagaacgattggcctgttattgatgtggctggtgaaggcgagacgttgcacatggatttatatactcagatctgtgaatccgtgaatggcctgcacgagaatccattgccatcgtttgtacttacccgtagtcaaggcaaacccgaagtgatcattccgctgatcgacgttgtcattgtggatgaagcctaggggctctgttcagcttaagaaggttgttctgtcatcgcagtgcccgtgtaaataatcttagtcaatttataaagaaccgaattgaggtgacgtagacagatgatgaccgaggagattcaggagcaatacgcggacgagctagaagcttttcacatatggatgaaggacgccggatatacagggcatacggtaaaatcatacaccggtgacgtggtggaattcctggtcaccattcaaggaaagtcactggagcaggtcaaaaagctgcatgtgctgtcttttctgtcccgcgctcgggagcgtggggttagtgatgccacgagaaatcgcaaacatgcggcggtgaactgtttttacaagtccctcattgaacttgaattgttaaccaataatccggcgtttgggatcaagaaatccaaaaccgagaaaaaccgtgcgcccgttttccttgatgaaagtgggctgacacgtttccttgagtcggtagaaggcaagtatcgtacacgtaatttggctgtttttctgctgatgggatatatgggattacgggttggagaagtgcatgctctggattgcaaagactataacgcggagcggcgtacattggacgtattcggtaaaggtcgtaaatggcgctcgctccctgtaccagagaccgtggcaaacgtgttatctcaagcgatggctgagcgtctggaaccttggcgaccaaaagaggaagcgttatttgtctcccagaaagggaagagactgtcgattcgcagcatccagcttatatctacggaaacctttgaacgattccagcaggaatcaccagccaatcaacgtcaaaattactccagtcataagctgcgtcactccttcgcgaccatgatgttacgacgtggagccgacttgcgtacggttcaggaactgcttggtcatgcatcgattcaaacaacaaccgtgtacacacacgtcaccagtagggagaaagaagaggctatggctctgctggacgttaaacttccgagcataaggtgatggtttaataaaactcattgtacgaagaaagtggaaagaatgaacgatgaaattcaccttaaatcagaaaatatttcagaagagatcgttcattttaagaaaaggtttaagcattttaaccaaagttcgaataacctctctagaaagactttataagtatattcttaaacgagagaaatgaattctctgattgaattttactcctatgattgatttaattgtattgctttcccttctaaaaggtatatagagtaagtcattagtgatggttgaacaaattaaatattgttattggttgtgacagtctggggttttgtggaaatcgaaattagggtgtttattaaatttttttgttaaccgcagttatcgttttatcacgtacaactccatacaatcaggttctgttttgatcatccgacctctttcagatggtgcttatttgggagtaacctattgctatgcttcaaatttatttgttcctaaaaccttaaatttgtaccagttgatacagctattatgctttttgtggtattaccgaaccttaggaagatgatgaatacggagtggctcctgttacatcaactcagatcaagtttgcatgcggcatgtcgtgctcttaattagttgatataaatacttattaagaattaatagttaactttttaaataaaaaggagttacagtatggatcaattaattagtgagattttaacaaatacatcttcgcagcctttcatagatccaccagtagaaacaaaaattcaggaattacccttttcaaaactaacatgggaaaactttgaaaagttatgtttaaaattaattttattagattcggatattctacattgtcaacaatatggaaatagaggtcaagaacagtcaggtatcgatctctatgcatatgaaaaatccgaaaattcatataaggtatatcagtgtaaaaaagtaaaaaaattgggttcaggaaagattaaagaagctgtgaataagtttcttgaaaatgaatgggcgggtaaagcccattgttttgtcctttgtacttctgaaagtatgacttcaaaagcaagagccgatgaaattgcaattcaaagggataagttaacaaacatgaatattgaatttcaaatatgggatagtaataaactatcaataatgttgaaaaagattcctagtcttgtagaagatttttttggtataaagtgggtagactctttttgcacaataagctctgaaataattacaaagtcaaataataatacatattctccaagtattataaataacattttttttcgatttaataaatttaaaggaagaaatgatgaattgaaaattatccgcaataagttactagaatgtggaaaagtattcattactggaatgccaggaattggaaagacgcaattggctgtacagtatcttacgctgtttaaaaaacattatcaaacaatttgttggattcgctcagagagtagtggaactctcaaagaggatctatacattttcatgaaggagatagacaaagagtttgatagtttaggtattattaatgatgactctgttctagggtatgttcgcaattggatggaacaaaatcggaattatttaattgttttcgacaatgtaaaatcgcaacgcgaactaagacttcttttgccaagtacatgttcaggtcatttaattgtgacaagtcaagatgaatttgttgaggacacaaaaacacatttatctctaaagtcattatctaaagatgagtcaatggagcttttgattcaaatgtctggaagagaaaaggatagccatgcactgaagatcacagattatttcggtgatttgcctttgtctattgttcatgtgggttcatttatacgaaattctaataagacttttgaacaagtccatgatcttcttttgaatagacctattgatgttaaaaagagaataggttctattgtttccactgataaaagttttgaaaacctgattgagattattcttgacgaattggtaaacatcgaaccgaattgtttagattttttaatcctattatcttttttatcttcagattatatttcccttgagtggttcgatagacagacagagattcctcaacttatatccatattcgaagacgaattattgtattatgatgttcggagtgctttattaaggtactcgttcattaatgaacaggttcaaggaaatgtgttaaatattcatagacttttacagtcaacgatcagagagagattaacttttgaagaaaagaaaaattggtacatgcaaatgactgagttatttaacagactgatgcaaaaaggggatctcagtcatattgaatatcgtaaaaaaggagacttagtcaaccatataaaaacattggcagcacattacgagactaatatgaaaaacagagattttttaactttgttaaacaatacttcaaattacttaagagaggttgcacgatattcggaagcctttaccttgcttgaatttgtctggggagaatacgagttacatcccgaggttgatgaagtatctaaagctacggtactaatgaacatgggattggcgttaaaaaatcagaacaagtactcagaagcttcttcttactacaatcaagcaatatctgttcttagaaaaaatagttaccatgatagctttcaatacgctatttgcttaatgaactctggacgtttggatatggatctgggttattatgaagaatcttttgataaactaaagctatccttagaattagttgatcgtttaattcctgaagataacattgaaaaagtccattttttaaataactacgggttgatccttcagcaaaacaataaaagtggtgcttataaatattatattaaagcttggagagttctaaaactgttttgtcaattagatactcctaaggcagctttgatatataataatttatcagtcattctaatgaaacgaaagaaaactaaatgggcgattttatcactgcaaaaatctttggatattgacatgagattttttggagacaagcatcccgtgcttgcgtacagatatcaaaatttagcggatgcctatttgagaagtggatttcattgcaaagcattacaaaactataaaatggcttataaaattaggcgaaaatatttcgatttagaccatccagatatcgggatcttatttttgaagtatggatatgttttactggaaagaaaaagatatgcagaagggaaagagtggattcttcgttcactaagagttgatgaactctttttcaaagatccattacatcctcaacttgaacctgccttagagacactggcatatatccaaattaacttggtgaataatcttttaaatcagagcaacagagatattcaacaaataagactattgtgtaaacaaggcgaaaagtatatagtcagagccttaaaaataaaatattctgaggagaaaattacttgcttagaagagtttaaaaaaattttgaaggcaattcataaaggtagaattaaaagcaatatggatgtggacatatcgtttacttcaccatatggttttggtgattatttacgttttatttctaagaacctatatatacgattggacggagagggtgggatatttcataaataatcaaaatttatctatttccgttgcctcttgaagttagattgaatttcccactaacgctcactagttccatttatcaggatcacctcactagtagaaaccaaaatctgctacgattcacctgaaattggagtaaccctgaaatatgattttcttcaaagtcaaagtgtttagaaaacgagacacaattagactattttaagtcactattgttatgtaaactcataacaataaccttattatagataagaccattcgaagctaggaagtttcgaatggtctttattgaagaaattttgcgagtgaaaaggatctcactgccctctcgtataaaaattctgggaaatattattccaatccagcgatctgttcttttaatttgttagcagaagcctggaaagccactttttcggtttcattcaacggaagaggcagaatttcgcgcacaccgttgcgatcgacaacacatggaacacccagataaacatccgatacaccattgtaatcttcaaggtacgtggatacgttcagaacggagccttcgttgccgagaattgcagctacaatgcggtccagagcaagggcgattgcataggaagtcgcgcctttggcattaataatctcatacgctgcatttttggtgcggtcgaagatatcctgttgtgtttcttcatccaattccagatctgttcctgcaacgttagccaggctccataccggtacttcggaatctccatgctcaccaataatgtgtgcgtgaatactacgcgggtcgatccctttattcttaccaatcaggtaacggaaacgtgcgctatcgagcaatgtacctgaaccgatgacacgggaagcaggccatccgctttgtttccatgaagtataggacaaaatatctacaggattggttgcaatcagtaaaataccatgagaattcacttcagtaatgcgctcaataatatctttgaaaatgcttgcatttttcttcagcagatcaatccgagtttcgcccggcttctgggaagcaccggctgtaataataatgatatctgcatctttgcagtcggaataatcgccagcccatactttcacgcctcccgtaaacggaagaccgtggttcatatccagcatttcgccggttgctttatcatgattcacatccacaaataccaactcggacgaacgctgtctcaacattagcgtgtatcccgttgttgttcccaccgcacccatgcctacaattacgacacgacttggtttcagagctgcactatttgtcatgttcaatatcctctcctttttgggttatactcccatccatattaagggattagagaatataaagcgagtgttgtctataaaatagttcacatttcatgtctttttaccaattattccgtcgaaaaacagtttaggatgaaattaatggtaataaatgtgcgacctatagcccagagtatgagctggaaaaagggagcggccgaccatgagtgggcaatgagccttttacataaggtttgtggtagaataggagcagtggattctgatgaatcgtaaataaaacgccataggacaggcatgcgcgcctgtatattggatgagagaggtggaacccacttgcgtttgcaatggattaaaatcgcgcagacagcattgctgtctataggtatagcagctgtattggctgcatgcaccgactcagatcaacctccggtagcagaacctccgcagcagcaagaggacgccgggaatacagggcagacgttaactgtcgttccccctgtgaacagtacagaatctgcagatatggccaagtaccaaatacagacccgtttgacagattttcagttgctcaatgacaacggaggattggcgtggggtgtgacgcggaatgcactgcgcctgtactacactcaggatcagggaaagacctggaccaatatttcaccttcggaaaatgtacagtttccggctaaccctaaatatggacaaagcatttattttgtagatcgtgcacatggttggattgttcgtgaaggcatgggtggaacagataccatggtgcttcgcaccaacaatgggggcgtaacctggagcctgtcttctctgtccaagacggataaagtgactgcgatctcatttgtatctcctgaaaaaggctggattctcaccacggtcgataccgctattggtaaacaggacaagaaactttacttcaccgaggacggtggaatcacctggaatcggatgtcttccagtgatgaagatggcaaacaggaagcagaagagatttccaaacgtggatacaccacggggatgactttctcggatccaaagcatggtttcttaacagcgctggagttcggcacaccgaagttatatgtaacatcagacggcggtgagagctggaatactggaccatccttctttgatcgaaacaaattcaacgggtgtggtaatttcagtgtcagttcaccacaattttttggacgtgaagcgcagtcagcctggatgtcaatgtcctgttctcaaggggagagcacgacattcaatggattctttaccaccgatggcggaaagagctggaagctgtccaatttcactttaaacaaacaaacgggtccgaatcgtaacctttcaccggtatttctgaacgcatcggaaggttgggcgatgcaaaagggcataacctaccacaccaaggatgcgggcaaaacgtggagcgctcttcctgcaagcagtgtactggagaaaattctcgaagattatccggagattgtgaagatgcagatggtgactcccatgcttggctggatattggttgaaaatacagatgccaaaagatcattgttattgcaaacggtagatggcggtgtacattggaaagtactctaaagtagagtgttatcgatgttaatagataggagaatggagaggagcctcagggttccttttcttttttgcttagtttgtgaaataaatcacaaataaatatgttagaaggtgatatatttaactcaacaagagaaggagtgatgaagatgagaaccaacggtcaaactcaaatcacgcaggcggatgaattaaccagatatatgcttcaattatgctacacatgtgacgatgcgaatcgttgtacgacagaggaagcggtgaaggcttgcatggcagaacacgcacaagtagaccaacccgaacaagccgaaggtgaagatgtaactcgcgggtatatggatctgatgtacgcttaggctaatcattcacagagaacgctcctgcgggagggttctttttgatttggagagaaatgtatgcgcttttaaattcacttcgcaaatattgcagcatgggttattatagaaataattaaggtaaattactcaaaatgtggaattgtttattgactcttagtttggaggaaagtgacatggataaacgtagtattcattaaaccaatggcttgttttgggataccaaaggacaacttttgtcatccacaaatgtgttgctgcagaagaggatagacttgttattaaaaaatgttactttgataattgatgcaactgtaaaatgatgattttgctaataaagcaaagatgctccctgtaatctttgtgataaaggcacgaaaactataggggcatgaagttagtataaatgaattgaatctacttggaattgaatttacgaattaaaaggagaaattaacttgcatagattatcctcagaaaattccggacttattgtttctgctcattttgatacattacctgcgttaaattctttttatattgattttgaggatggagaaacaattaatgtagaagatgggtacgctaccaagcaaaagcgcttatttcgggttcatcataaagatgtggataacatgatttcaagtgtaggtgaaagtaattttttttcattacatcgcgtgttcctaagctactatgaagcgcactctaaattaggacacctttggagtcatcaggttactaaagaagttgtacaaaagggggagcatattaatataagcgacatagagaatgtgctagaaacgaaagatgttcaaatcgctgattcaagagctttgaagtatgcaaatcatatcatgaacaaaggaaaagaacattacgtagaagcaaattcatttcaagagtatttatgggcaattcagatgaccgagcttcttcgaacatataatttgtccgcatttgaaaaagttacgatcaataataaagacatattcaatagttcttatctgtttaagggtgcaatagtaaaaaaagaaattagcgtagtactgtatgaatgggctaacttatatagttacacacaatctgattttattaaaaggctaagcaatattctagagaccataaatatggatataactcgaaacaaaagcttatatgataaaaagtctatcagacctgaagtaaaccatttggtatattcgctagataaacaaattcatagtaattctcattataaggggtgcttctttggtatgtttaatgcttctgatttatttggcccttattcacgtcacagcagtcaccaaatcaaaagtattaacggaataaacacacaagaaaatgttagttgtaaagatattgttacagattggagaaaaaacggcatatttccgaccgatcagcagtttactaagttattcaagctttggtacttcatcacttcttacttggtaattaactggttgagacttcctcatttcaacaaatgaattaagcgctatttaatccatagaactaacactctacaatgaataaaaaatttgaaggagagtggctaatgaagattaatcgaagatattactatgttaataaagtaatcgcttgtgttctgatacttgcattcatcattacgacatgtgcggtacctgtaaacgctgaggtagagaatgtagagactacgccctccagaattgcgttgtcgtcgttaaaggaaacgattgattcatatgtggccacgaatcagaagaataccgctgccgtttcggttgtagctatcaagaacggtgagactattgtgaataaggcctatggatacgcagatcttgagcaacagagaaaggcagacacctctactgtatttgaatggggttcaacttctaaattattggtctggacgagtgttatgcagcttgtagaacagggaaagcttgatttggatactgatattcaggactatttgccggaaggatttctaaagaagcttgaatacgatgctcccattaccctaatgaaccttatgcatcataacgcaggatgggaggatagattgatcgatttatggtattcatccgagagtgatattgtggaattaggtgaagctttacaaaaatttgaaccaaggcagatcaataaacctgggagtgttgttgcttattcaaactatggtacggctatggctgcttacatcgttgaagtgcaaagcggacaacccttttacaaatatgtcaacgaacatatatttaaaccactgaacatgaaagacacatcgattcacccatcacagtatgataatctaaacgtcttgaaacgaagaaatgagattcagggttacactacgaatctgaaactaattcctaagaacagagcatacataagcttgtaccctgcggcgggggccattggcacagcagaagatgcagctaaattccttgcagccttgatgcctgtggatcgtagcaatttattgtttgagaacaaggacacgttagacgagatgctgtcaacaagtctatattacgatgggacttctactccacgaattgcacatggcttctttgaagtagagtactgggtgcctgcattagaacacgctggaagtacggcgggattttcaagtaaatttgtttttgacccggagtctaattttgggttagtagtcatgacaaaccagtcaaatgaaatggcttataacgttggtcttgtccagaaggtgtttggaagtagtttcagcacgaattcagttgaatctgagagtggaggatattatctgcctgcgcgacgggtcgtttccggttttacgaaggcatattcgatgttaagtctacagaaatataccacatttgaccttagtaactttgcaaatgttgttgagagtaacggtgctattgagaaggtctccatcccttataatgactttttgcccgtatccaacttaacgataaacttgatcaaagcatcttttattgctcttgcagtagccatcctgctcagtttgagagcgataattggctattttattcggttatccaaatacaaattaaaaaacggggaaagaccaggtacgggatttgataaatatcatatggttattaatattgccagtctggcattaatttcaaatacgatcctattgttcatgcgcgccttaggctttgccccttattcttcgttacgcatacatctcattttgaacctggtttatgtgattctagctgtggcgtatcttgttttgttgttctacaaactgctgaaaagaagctatagtaaaaagcaaaaggcggtatacatcatgtctggcatgtcggctttcctatttgctgcttttattatgggatgggatttgtacttttagagcggaattatcgacgggaacgttatcagaaagggcatgagatagtagaaaggatgaaaccatgaatattcaggatctcccaattgaaataaaagaacatataggggtagtccaaaaaatcacttttcctaagcaaggtcatacttctactgtggctatactggatacgtttgatcaaaagtacatcatcaagaagacagaaaacgatctttataatgaatggttattcgatgaatataaggtgctccaatacctttaccatacgggactccctgttccaaaggtatattcatttcatactgaggacacatcgagatggcttctgatggattatattgatggaataagtttaagagaatttctctctaagatgcctgacctccaaagtaaagaaaaagcgatttttaactttgggctttgtttaaagaaaatacatgaatgctcttgtcctgttgaattattgaacaataacactccttggttagatacaatgcttaacaaagcagaatataatctaactcactttgctgtagacggatcagcagaactacttcaacagttaaaagaagcaagaccaaaaccaacagagaacactttcattcatggagattttactatagataatgtgctagttaatgattgcaatattgttggagttattgattgggcaggggcagcttatggcgatccaagatatgatgtagcattagctattagaccgaaacataatgcgtttgataatgaaagagatagagaaatattttataacgggtatggaaagttaagaataacggatgaagaatataattactttgaagatgggatatataacttcttttagtctggctaaaattgttcttcaaacgtatattaatctctctagaaggagtcgaatcaatgagccctccaaaacatatcttatctgccgctgcaatcgtgataaacgacaaaaatgaattattactaattagaggaccacgaagaggatgggaaatgccaggtggtcaagtggaagaaggagaatctctaagtcaagctgcgatcagagaaacgaaagaggagtccggaatcgacattgaaatcatcaaattctgtggaatttttcaaaatatcgaaaattcaatatgtaacacattatttctagccaaaccaataggaggagaattaacgacaacatcggagagtttagagtctggtttctttccgatcgatgaagccattttaaaagtcgaatggaaaaacttcagagaaagaatagagtattgcttaaaacctgagatgcaacctttttgcattgagttcagtgataagaataatatttaaaagtttccgagaaggaagttcaatcattgaaacgagtcgatgtgaatcgtcggagggagagaagagatatcaagaccagacgaaatctctgagattgcatggttggatataacacaggcagatgagcttatgccttactacaagaacggctttaaaagcttacttaatggcaatgagattacatatttcaacgaaggtaacaagtaatgttctgaatgtagtgtataaaggaggctatcagatgaacaagtacagtgtttatgaaacaaacagcttttattgggatacaaaagggaatgactttttgagtgcaatcgtgcttccacattatggagcatttatctcagaagaaaaacagcaactttttggtgatgtctcaggattaaagatgttagaggtgggctgtggaaatggtcaatccttgcagtatcatggagaccgcaaagcaggtgaactatggggtatggatatatcccagaaacaaatagaaaagacacaacagcacttgaggacatacggaattcctgcaacattgatatgttcacccatggaagaggaatgtggtattcctactaattattttgacgctgtgtattcgatttatgccataggttggacaaccgatcttgaaggtactttcagccgaatcgcttcttatttaaagaaagatggtatttttattttcagttggtctcatccaattcatagatgtgtcgttgaagaaaatgatagatttgtcctcaataagccatattctgatgaatcgtggtatgcgatatctcctgatttttgtcagggtgaattaaccttggctgatcgtcaactatcaacctatgtcaatgcgttagcgaaagcgggatttgtcattgaacaaatgatagaagaatccgatgaggatatcatgcaattacataataatagcgatagtctccttaaaagagcaaagatgttacctgtatcctttgtgattaaagcaagaaaacgatgattaaatgaaatgaatcggagagtgggctatgtttatttatgggttgaaagcagatcaatggagaacgtaatagatcaaattttattttaactaaaggagctagttatgagaagattaccgctttttatagtgacaggcgcaagtggaacaggaaaaacaacgatctcttcgcttgttcgcaagcaacttcccgaatttgacgtctttgacatggatatcatcgataacgtggattggcagattgccaaagagaattggttgaggattgcgtataacatatcgctaagtggacgagggactgttttatgcggaacgatggttccggaaaacattgcatcgtcggattacatagatcgatttgatcggattctatatatgaacttgcattgtgacgatgttactcgcgagacgcgtttaagagcccgtgggtgggacgagaacctggttgaagatcacaaaaactttgccaactggttactccagaattcagaaactgcgtttgacccgccaatgcaaacaattgatacgacagaagttacagtagagggagtagctgaacaaattaaagaatgggttttaaagaactggtgcgaggaatgaacattgaaaataacctcatagttagattgagtgggaggaacaggatgctgccttttcaagtgaatgaatctattgttttaaagctgatccaatctcgagatagagatgagttgtatgcgttaattgatgagaacagaaagtacttgagagagtggttactttgggttgataaaagacaatcacccagcgatttatattctgtaatagaagtatggacacataattatgaagagaagaacggttttgattccggaatatggttcaatgaacaattggtcgggatgttaggattgcattatattgattggactaatcgagcaacgagcattggatattttttagctgagtcagcacagggcaaaggaatcattaccaaatcaatagaacaattgcttaaatatctctttaacgagttgaagttaaatcgtgtaatcattcaatgtgcagaaaacaactttaaaagcagggctatacctgagaaaatcggattttcatatgagggaacatccagagaagctcaatgggtttacgatcattatgagaatattgtgacgtatagtctgctgtctagtgaatgtggcatacttaaacggtagagtacatcgtctgatgagacgaaggaggtcacgaattgtttctcaatgtattattttggttgattattctctgggtgatctccctttatttcagttttcctaagaaagatcgcatgtacacagtcaatgtgccaagcacatattacattcaatcttcaaatcggttggatattcagaaaaactacgaatgcgctgcattttccagtgcgtttgtcttgagacatttcggtttggagtccaacggaacaaagatttatgaaacctatcctcgcaaattactggatggtacggtatatcccaaagcggtcgttgtttttttcaggaagctaggatatcaggcaatgtacttacgtggtaatgtgaatacgttaaagaaacagatcagccaaggggtacctgttattttatttattagagtacatcccaaacaacgttatttgcattttgttcccgtcgttggttatgatgaaacgcatttttacttggcagaatcgttagaccacaagattaattgtgatgaagaatattacaatcggaaaatcagcataagtgaactcaacatgttatggaggtcgtggttacctttttctcaaaactcctatatcgtcgtccatccgacgcagatttaagacggctctctttcaatgggcatgatttattagctttaaacgaactaatcggcattattcggaacgtctgggtggttaaatcatgaaactcatgcccaaatggcatgagtttttttgaacaaatatcgctacgtaaaccagctcgcctcaattaatggttatgaacaatttagatcaaccgtatgggcggtgtgatatccattttattgttttttctgggaattagctgagtttttaactaaaatggttgttcgtccacgcaccttttcatctacatacgtacattaaactatgtctgtagggaggtgtccgcactgtgagtcattcagaagtgaagaaacgtatgaagagaaaaaaggcaacattccatccgtgtaaagttaaaagaaaagaacgccgattgaaagtggtcaaaaagttcgttcgagtaaaatgtccgcctccagaagtgaacatatctacacctactgttgttggcccaacaggaccacaaggtatacaaggcgtacagggcgtacaaggtattccaggtaaacaaggggttgaagggccacctggagctcaaggaccagcgggggggccacctggaccacaagggcctcagggacagccaggtcctgctggagcgataggctctcaaggtccggtcggacctgctggacctatgggagcacaggggattccgggagaagcaggggccgtagggccacaaggtccgcaaggtaatccaggacctgccggagcaattggacctcaaggttttcctggagctgttgggccgacgggggcgacaggagtagcaggaccggctggcgcggccggtgcaacaggagcggtaggccctgctggagcagttggctcgacaggaccagcaggtgcaacgggagcagtaggcctgacaggtgcgactggagtagctggtcccgctggagccacaggagttacaggtgcgacaggagcagctggaggcgtattggggtttgctgactttttcgcgctgatgccacctgataatgctgcaacggttgctccaggtgcagatgttaactttcctcaagatggtccaacaagtggaacgacgatctctcgcacgggccctagttcattcaatctggcagccattggtacgtatttagttatgttccaggggagtatgaatgaagctgggcaacttatgttaacactcaatggtgctgatctttccaattcagtagtgggacgggcaacaggtacaagtcagatgccaggaatggctctcgtgcaaacaacagtaataaattcaattctaaccgtacgaaatccagcaggtaattccactgcattaaccatgacgcctcttgcaggcggaacaagacctgtatcggcacatcttgtgatcacacaaatagcgtgaatccggtaccaggctatgctaattgtcctcagctttattaaatatgcatccacattggtaatacgggtttgcttgaactgagatagcagtgctttacctgaggctgttatctcagttggagcggataatggtacaggagtaagtacatatcggataccctttttgtttttgaggaatggtgaaaacgtcactactaaattattttttcagtagataatatgataaaatattggaaaagcctcagaggtgagtacatgaagaatggacactggagaaaaataacatgggttgttgcggcattattattaatcatgatcacggcttgcagcgatagcaaattcaatccaaatgaattttcagaacaggatctggctgtgacgaagaccgacagtgaggataagattacgtatggaatgagtcaggaagaggcggagaaaatcctcggtgagggaacatcaaccggtgtgggtcaatcctatcaatacaataacggaatcacgattggttatagggatgccaatgtcgttagtatcatcttgaataaggactcgaaagggtactttaagaccgctcgcggggcagaggcggggatgacacatcaagagattctcgatctgtatggcaaggaacatgttttggtcgaatctgaacgtaatatcgattatgcctataatattcagaaggaaacattcctggatgagaagtcgctgcaagcggaaaaagatgatttggctatctatcgtgcatcgtttatgctgacaaaagagggacaggttaatcaggttatattgtcggatcaacgatttgcaacaacctttaagtaaaacatggctgctaggcagcagggtattagataatgaaatagtacttatttttcgtatgaagcaacccttcggtattctgccggagggtttttcccttcacaccgttcgatttcaatccggataacaagttccttgtttacgtgcatatacattacaggagacgggtcaagactccggctgtcctaagttgtatgaacggagggagagacatgggcattgaatcatcctggatgtttgatttgtttggaaccgtctttccggttgtatttgttctgattataggtatagtccttctgtcgatgggaaaggaggtatggaggtggggacgcaacaactcggagccgctattgaccgtgccttcacgtatcaccagcagacggatgaagatgagtcagtcgcaatctgaaccgggtagtacagcacgaacgttatactacgtcacctttgaagtagaaagtggagatcggctcgaattcaaagtcaatggcgaagagtatggtttgtgtgctgagggggatgaaggacggctctcgttcaaaggaacgcgttatgtaggcttcgagcgatataatcgcgtatattctgaacacctacggggttaaactgagcagcttgcgccagaatggcgtgagctttttttgattatttactggacaagcgtttcttaatgggcctaacgtgtttttatataagaagaggcttaataagattatgatcaaaggatcattaccatagaggaggcaatcaatatgtcatttacagatcaggtcgttgttgtaaccggggccgctcagggaataggacgaagtgtggccgaggcttatgcagtcgctggagccaaagttgtacttgccgactacaaggaagcagaaggggcggcagcggcagcttccattcgtaatgaaggtggagaagccatctttgtgcaatgtgatgttcggagcgagcaggatattacgaatctgtttcggacaaccgtggaagaattcaaacaaattgatgttttggtgaataatgcaggactcgccaagtggaagtcaccctatgagctgacgctggaagaatgggacgatgtactcaataccaatgtgagaagttgctttttggcgagtcgggaagcagccaaacatatgaaaagtaatgaacatgggggtgccattatcaacatggcttcaactcgtgcgctgatgtctgagccggataccgaagcttatgccgcatccaaaggagcgattgtagctctgacacatgcgctggcggtctcactgggcaaggaccaaattcgggtcaattgtatcagtccgggatggattgagacaggagacgtggagaaattgaaaaaggaggatcatgaacagcatccctccggtcgtgtgggtgttccttcggatatctcccgtgcttgtttatatttgtctgacccaagcaatacctttgtcacagggaccaacctcgttattgatggaggcatgacccgaaaaatgatatatgaggactagaaccgggattgactcgggcaagccctaagattatccaacataagagtaataagcccaagttaagcacttgggcttatttgtttttaataactcggttgctataataaatgtgattttacaacagtagaggaatggagggagtatatgttcgggaaacaatcccggaaggtattttggctgttactgctgatcggagggatgataatgatagggaatgagtcacctgctgaagctgatggcgcagatatacgggcggcctgggtatggcaggcacagtctgttagcaacggagatgagctgttggccaatgcagctaaacataagataaacaggctgtacgtgaatgtagacatgacgctgtccaaggaggtataccagacgtttatagccaaagcaagccgtgcaggtattgcggttgaagcgctgggaggcgatccatcctgggcactcagtggccgtgaaggccccatgctcagattagcgtcgtgggtaagtgattacaatcaagctgctgagaccaacgagcaatttgatgccatacatctggatatcaagccctatgtgttaccagcctggaaagaagatgctaagccactggtacaatcctgggtagccaatatgaatctgttatttgagcaagtgagacaggatggcgcagttacagtgaatattgacctgccattttggctggattcctataccgtcacaggaaatagagtttctgaggatgcagataacgaaccattgtcacgttggttcattgaacaagtggagcatgtcactttactcgcttaccgtgacaacgcgcaagggaacaatggtatcatacgtttgattgaacaggaaatgaactgggcagatgccagcaatgtgagcgtcacggttgggttgaacaccaagccaatgcctggcgaggagttcacgtcatttgccgggaaaggtgcagcacaactggaaagtgttattgaagaagttgcctccgcattcggcgagcatagttcctatgcaggttctgctgtacatgacatcgtatactggggacaactggagccgtcggaactgccatcaccggagattccatccaatcagccagagattcggggaacgtatatctgggaggcctctcaggtgacgaatgacgggggagagcacatactagcatttgctagagagcagaatattaactggttgtatgtccggttggacctggatcaaccctattccagctatcgcagttttgtgaaacgggcaaaagcgcagggcattgagatccatgcgatgggtggacaccccatctggggcaagaaggagaatcgtccacgcattcagcgcttgattgattatgtgaaaaactataatgctgaatccgagccggatgaacgatttgaaggcatccatctggatattgagccttacactttgccagagtgggagaatagtcgggacaccttattgaccgaatgggctgccaatattacatttttccaggaagaaacgaagaaggacagtgatctcgaaacaagcgcagaccttgctgtatggttggatagcttcgcgttgccaggaaaggatatatctgtggctgaatttatgatcggtacactcgatcatgtgtcgctgatggctttccgtaacaacgccgaaggtttcaatgggattgctgctgttgtgagtcaggagatggagatcgccgatcgtatcggtaaaaggttgatgatttcggtcgaaatgaagcagaaccacgaaggtcctcatatttctttttatgaaaaaggggcagcggagatggaacttcagcttgccaagcttccggatctgctggccgaatatcaggcttaccaaggcaacattgttcatgcctatgattattggattgaagccaagccctgaacaggcgagtattataagaaacgagttgcttcgggacttcaccttgggtgaggttccgggcttttttttatggaaaaaagatggaatcgtgtcaccgaatgggctcctgcacaatacgatgtacggtgatgaacagctgaaacaagggaggaaacagactatggctgttattaaagccaactcagaggacgtcaagctgctggctaggctcatgagggcagaggctgaaggtgacggcgaacagggtatgttgcttgtaggcaatgtaagtgtgaaccgggtgctggtggattgtctggatttcaaggatattcgcgatatcaatcgtatggtattccagaatccaggaggctacgagtcaacacagaaggggtacttttaccaacgggcaagacagtccgagattcgtctcgcacaacgggtgattaatggagagcgcttctggcctgccagcaattcattgtggttcttccgacctgtggccgagtgtccggcaacgtggtatgaccagcaaaatacaggacgtttcaaagcgcattgtttcttcagtccttcaggcgaagactgtccggaagtatattaaattttgggaggaatcatcatgattaatcagccttatcaaccaacaactcaaacactgggtcagcaagcgaattccgtgttgggtcaacaagccaattctcaggttcaaggtacgtcttacaaaatcggtaacggaatgcctgccatgtcaccaacgccagggatggtatcaccaagctccacaagtgtacccccactcgtatccagtggaagcccaatgacaccaacaggtgcagtgattacaacaacggctccacagtttgagcagtcatacattgagaatattttacgtttgaatcttggtaaattcggtacattctacatgacatatgaaggcaacaaagaatggaacgctcgcatattccaaggtatcattgaagcagcgggacgtgaccatattatcatcagtgacccaaagacaggtagacgaatcatgctgttgatggtcaacttcgactatgctacatttgatgagccgttgttgtatcaatatccgggcgtagtaggcaattacccgcaagctccaagcagataatcattggcacctcatcatgttgattgataactgacatgtcacatgtctaacacatactgatttacttcgctgtcctgaatgtggaggtaatccgcagacaggacagctttttacataaacatatatacgaaggttactataggtttagagttataggtaaccttttggcgataacatggcacttatacatgaatagaacaagcagcatgcttattatgaagggagtccatagcattgaattcatggattgaaggagcgatgaagggcgaaaccgaagcttacgcacaactgatgtctcaatatcgcgggatggctcttgctgttgcctacaatcgtttaggagatacattttgggctgaagatgtcgtacaggaagcatttactgaagcctttggcaatctgtccaagctggaagctcctgaggcttttcccgggtggttcaaggtgatcgtggagaggcagtgttatcgctggctaagacgaaagcaacataccatgattccagttcaggagctggagcatgtattccatgaagaggatcaggcgcataatccggaaaaacaagcggtgcaaaatgaaatgcatcgtacgctgcgtgattccattgcaatactgccatcatcgatgcggattgctgttgaactgttttatttggaaggatactcgctcaaggaaatatcggatttcctcggggtgaaggtacctgcattaaagaaaagactgttcgatgcccgatccaaactcaagcgctctatgccagtaagagatctggtctctgtattcagtgacttgtatgaagggggaaaaggattgttacacattatgaatggggatcacgctgccaatcgtttaagagaaagtggaattcagggagacatcctggtatggagagagttgtacacgttcggcccggtagccaaagagatgggagatacgaaggagcggcagaatcggtcatccgtgttagagcagcagttgggcattccacaggcggaatacttgaagattgaggaactggaacgcaagttgaattcgtttcaacaatacaaggaaattgttttatggttcgaatacgatctctatgatcagacgatgttatcttatctattgcattatttcagaggacaagcactccagaatacgaaactgaatctgctctgcattgactcgtatccagagattgagcactttagaggactgggacagcttacctccacacagattgaacgtctgtccggcagttggcatgtgattgagaaaaacgagttacaagccggtgcacagttctggcaagcctatacgtcgactgatttccggcatcatctggattacttgcaggtagacacttctgcgctaccctttgcgaaagctgcctttaaggcacatttgtcccgtctgccatctgtatcgaacggtctgggactcattgagcaggcaacactggagactattagagcaggtgtggagcatccgcatccattatttcgcgaggtaggagacaagctgcatattctcgggatgggtgatcttgaatactgggcacatctgaagcggatgacagaaggacctcatgctcttcttcagatgagcggtgcaaccactttccctaatttcaagcaacatgatgaaaaattccgtgacggaatcctgtcgctaacggaactcggaattcaggtgttgaatggagaagtcgattgggcactgctgaagcaggatgaattctggatcggtgggctgcataacgaaagcggggaacgagcgaagtggcgctggaatgccgcttcggaaaccgtagtggagattgagtccacatcgtaatcagcgaatagaatctgagaaaataacagtattataaaaagagagtatccagccatgcggaagcatgagcgaggatactctctttggttctggtagatcattgtttgtgaaatgttaaaaaaacagcgtaatcgagacttttgttaaagaaaaaaggcgtttgtgccatttcgttgtcataggacacggattgactgtgtagtttagaattatataataaaagaagcatatcttttttattcgacagaacaaggtggaggtggaagcattgggaagttgaaattgcatatgagcggcagaatggcaaatatcctacattttcgaaggaggtggacctatttgccgaagaatgacggcgaataggatgaaaatttgagtgaccccttaccgagtattttaaatttagtaatcattggtttacttgtattaatgaatggtttctttgtgtcggcggaatttgcgatggtgaaagttcgtggaagccggattgaggctttggtggaaacaggcaacaaaaatgccatctatgcttccaatatcgtacgtaatctggatgcatatctgtcagcttgccaactaggtataactttggcttcactgggactcgggtggctgggagaaccggcaattgcacatctgttagagcccatgtttaccgcacttggactgggaccagtctacgttcatggaatctctattgccattgcatttgtgattattacgatcttgcacattgtactgggagaacttgcccccaaaacgatggcgattcgaaagtctgagacgatcacgttgtggtctgcggctttgctaacgtttttctacaagttaatgtatccattcatatgggcactgaacggtatggctaacggcttgttgagactgttccgaatagcaccagcttcggagattgactcggcacatagcgaagatgaaatacgtattctgatgaaagaaagcaataagagcggtttaattgataacactgaattagcacttgttgataatatatttgattttacggatacaaccgcccgtgaaattatgattccgcggacggaaatgatctgtctgaatgccaatgagtccatgctggaaaatctggagattgccagtgagagtatgcgaacaaggtatccggtatataacggagacaaggatcatattatcggctttattcacattaaggatctgatgcgatcccaacttacggataccatctccgtgatccggcccatcctggctgtgccagataccacgctgatcagtgatctgctcaagcgtatgcagcgtagcaagacacagattgcgattctgattgatgaatacgggggaacctccgggcttgttacacttgaagatatcatggaagagatcgtaggcgagattcaggatgaattcgaccatgagcgtcctgtcattgaacaagtggatgagatggaatactctattgatggattgatgctgattgaagaagtcagcgaacgattcggactggagatggatcgtgccgattacgataccatcgggggctggctgtactccagagtagatgccattccacctgaggttggtcaatcggttgagtatgggggttatgtatttgtcattcaagagacagagcataagcggatttcccgagtaaatgtgattaagctggaactattggttgaagaagaaggcgcgtagctagatcgaaattgtaacagatgaagctgtatggtgacgtaatggtcatcgtacagcttctttgcatgctcatgattctttgggtgcatgaatgacaatatcggcgtaacgattctccgtgaccaagctattctcgatagaaattcgcttataagtgacgtaaacattctctccaggagccagatcatgctggatattcagcttttttcgagtggattgggttgttgtcggtgtcttaatggtgatgatggcgtacatgggcgtatcgacaaaagtaacctcgtgagaattgtagtcccccaccttagtggtggataacacgggattttgcttatactgggtcaggtgatcattcaccatgccaagtgttacgggtaacacataaaacagaagtaccagaggcagaaggcagaaagcaatcccgaaaacacgtaaaaatttgacatgggaaagggttcgtccgctctgcttgagtaaaagaaaagcaaggacgggggacagtacaagtccccagatcataaagggcaatacatagcgttcaatccccatgcttatccagctttcccgagctgtagccaagaaatatattaaggtccctgcggtaagtgcactcaccaagataacaagccaacgtttgaacgagccggaaacttcgatatgtagttcattcggattggagctgtgacgatgccttctggatttggattgaagtttactcaagttatacacctcatttgcaaatctggttggttcatatggtttcgtgtatccattacccaatacatacgggctggaattatttaggtttcaaccatgctggagatgcatgcaaagataaaagacgctgccgacagaaacatcggagcgtctaattttttttgaaacctgtaacccgatccgtccgtttatacccttacacaaaatcaagtatggaaccggaggatggatcaatatgcggaaaacgaaaacaaagagtgcagcatctatactaaaaataacccttgttgccttgttaatggtgccaacaatcctggctatacctacgtccgaaccagccgttgcaagcccgatgatcaacgtgtcctctggtgcccttacacccccaccgccgccggaaccatccatccattcgcttgctaacactcgagaacttggacatatctatcaagcggtcggtgcagtcattcctgggggtggactatcggctatcgtcaataccaagaccatgacatatacagcaatgaagacactttccgtagattatcgacttgagcgctggacaggaacagcatgggtaacttttaaaatgaattccaacaatgcaacgaatacaaacttactgaatgccgcatcggattggaccgttatgccaggatattattatcgcgttactagtattcatacagcgtatgatggaagtaccacggaaacaagcaaacatgtctctggcaccgtgttattttgatcttatcgacgggtgctgcctggaaacttctgctcttgaaaatcgttggcaatagcagtcatttcttcttccgaaagggtgccaaacagactcatattgttggaacccatcatccactgaaaggagttatagggtgggccgatatacatcagtgcttccgagccatccgccagctttacggtgctcatatcacgaagcatggccccttcaattttctccccaggcatgacatggacataatcaaactggataatctcatcctctatgctcttgccttcactggtatattgaactctcatttgtgtggactcataataatcgtctggattcacagggttttcagtatcaagcacaagttcgaatttgaccttgttgaatcgctcgggaatggcattggataacagaaagtcacccatgaacccttcgcgtgcgatctcttccgtaacaagtactggacgaaacaggtggctcgataactcataagaaggtgtattaagcgcctcttcttcttgtactttaagaatgtcttctaagctggtttccggtggtggaggcgttttggctgttgacggatcagcccccagatgggtcgtgcgatcctcgatgacaatggatttcatgccattaccccaatctttgatggattgcacaaaaggggacaccgcttgcgtaccggacggcaggctgaaaataacagctccgatggtcacggacgcagctacgacaactgaaagtcgcaaggtacgtattctttttttacgtaaaccgattctgttaatttccctgtgtaccttctgccaggattgctgcatggcttcggtatgggaggcggaaggggcagagacggcctgatggaaagcttcatcaaaagccaggtcaaacgcagcgtcgaaatattcgtcttccagctctgaatcgaattgctccacgtttttatcggacttgcctttgctcaatgcttccaccccattccttatgtaatttcttcttgatactgccacgggctctgaacaaacgttgcttcacaatgtcttcggaggtatccagcagttcggccatctctcggtaggagagaccttttttccaccgtaactcgaccaatacacgatattccggtttgagctgtctgagataatattcaatggactcttccatcatctgcgtttctaccatgctttccacggaagctgccgtctgattcattgtctccatatctataaaaacactatccgtatccaattggttacggttatttttattttttctcagataattaatagctgtgttccgtgtgacgaccttgagccaggctttcagtttgacctcgtcttcaaagatgggtttgtttttaatgattttgataaaagcttcctgaataatatcttctgctgcagcacgctccttgatgatataaacgataagaccatgtaccatattataatattcataatacacttcttcttgaagtgcagagcctaaattatggaaatctgaggctagtaataactggagccgattggccatgatgttctcctttctggtgaacaatccacaaacattggtatcattacattttacaacataatatggaaacgatacaatgggaggttggtccgggaaaaaccagatgagggaagtatgtataacatgcgggaaagttggctgaaaattaataaaaggccgtctcgccaaccatgatacatggttgcaagacagccttttcgactgttcagagaaaatacattagaggagataactctccgtgatcagttaaaacgcccagtctcccttaaggaagatggcttcacgttcgccgtttgccgtgattccgtagatgtccgtctcgggagagcccatcatgaagtccacatgggtgatgctggtgttcatgccacgagctgcaagttcttcaggagacatcgtttttccaccttcgatattaaatgcataggaactgccaatcgcaagatggcaagacgcattctcatcatacaatgtagtgtaatacaggataccactctcagagatcggtgaatggaagggaaccaaagcgacttcgccgaggtaatgagatccttcatccatggaaatgagtctttccagcgtatcctgaccttcttcggcatgaaaatcaatgatacgtccgttctcaaatgtgagtgaaaaacgatcaatgatactgccgccatagctgagtggttttgtgctgtacaccttgccattaacgccatgttttgctggagcggtgaatacttcctctgtcgggatattcgcgacaaaaggggtgccttgctcattcacgctacctgcctgcgcccagatatgaccttctggaagctcgacagtaagatccgtccctggggagaggaaatgtaatgcttgatacttcttgttgttcagggcaacggctttggtctccagtcgttcaatatgctgttcccaagccgctacagggtcctccagatcggctctcaccgcagcaaaaatggcttcccacaactggctaacctgctcagctgccgggagatccgggaatactttggctgcccaatcgggcgaaggacatgccacacccgtccagctcattttatccgcctgttgatactgacggtacttggccatcgcctggccatatgtacgctgatgagtggaaatccgctccgggtcaatacctttcatcagatctgggctggatgacaatacggtcagaaaggctgcattattggctgccagttcttcaagctccgctgcatgccatttcggcggctcttggaaggattcctcaggggccatctcaaaccgcaatcgattgacggtttcatctccgtattttacaatcacctgcttggcgccagcttcatatcccttgcgtaccagcaaacgtacgaattcagcggtatcaatcatcgcagagatgacaaatacttgccctggttgcacgttagcacctactcttacagcaagttcagcgtaacgatccagtttttgttcaaaacttaacatatgagttccctccaattgttgaatttttgacctgttgacgcaggaaaagagaggagtaatctcctctctcctaaatcacatcaaacgggattagaatgcccagtttccttgcaggaagatcggctcttccgcgccttcggaggtcacaccgtggatgttcatttctccggatccaatcatgaagtctacatgagtgaggctggagttcatgccacgttcaatcagctcttctttggacatcgttttaccaccttccagacagaaggcataggcattaccaatcgccaaatggttggaggcattttcatcaaacaaagtattgtagaacaaaatattggtatcggaaattggggactgatgtggaacgagggctacttcacccagatagtgtgcgccatcatctatctcgatcaggtttttgagtgcatcgagaccttgatcggcggtatagtcaacaattcggccgttctcgaatgttagtgagaaaccgtcaatcaggttgccgccgtagctcagtggtttcgtgctgcgcactgtaccgttaacacccgttttcagcggagccgtgaatacttcttccgtaggcatattggcaataaagacatgtccttgctcattcacacttccaccggatacccagatatggccttctggaagttcaatggtcaagtctgtgcctggagctgtatagtgaagcttcttgtattttttgttgttcaacagatcagcacgagaatccaggttttgcaaatgggttttccattcggcaacagcatcctgctcaccgatccgtaccgttttgaaaatgacatcccacaggcggtccacttgttgcgcttctggcagatccgggaacactttagctgcccattccggagaaggaaccgccacgatagaccagctgaatttgtcagccatctgataagaacgatatttttcgagcgctttgccgcgcactttttggctggtaataatgcgttcctgcgctacaccgttcagcagatccggattttcagcgatgacgtgcagaatagcggcaccttcttcaaccagttcagtcatttcagctgcaaaccatttcggttcaatggagaaagcttcatcaggtgcaagatcgtaatgtagacgtgtaacggtttcatcgctccagtttactttgaccaatttcgcacctttaccgtaagctgctttgacaatcagtcgtacaaaatgtgctgccgagattggagcgttaaccacgagtgtctgtccaggatggacattgacaccgacttgtacagccagctcagcatattgctgcagattcgtttcaaaagtattcatgctattttttcctccaatgtgataataatatcgtagcttgttggctattatagtcctcattacaactatgtaaggactcagaatggttccttcattgaataaggtatacgttgctacgttatatattgtacaattaaccaataataattaccaaactaggtttaccagaaatgttggagaccgactgtagatgaaagattaaaggagagaatgattgtgaaaattgaaattataagtactgaaatgcgccgtgaaggtgaaaaaggatacgtgggaaataccgtttaccgcacagaaggcgaaaagtcagtatatgagattaccttcatgagcaagaacggaaaagattgggactatagcttgcatttcacagagcaatccggtgatgaagaagagttactgcgtatggacgagttgcttgagaatgatgacgatctgtacaatcaattgctcgatgctgctttggaggcatttccggcataactggccgagatgttcttgttctattgtgttgtgtcgatgactatactagacggtgtatgcccaaaacagggtgtataccgtctattttattggaaatgttgaatagatgatccagaaaagggaagtctacgagatgaatggaaccagagagacaatccgcctaatgggaggtaaccgtgaatggcatctgacaatctgattacagaagggttgacgggacttgaagaagtcgcgcccgatattctcagtctacgtacactattcgttaatgtcgtgttcatcggagagccaggaagcaggaactgggtcctcgtggacaccggaatggcgaggttcacagatcatattgttcaggttgcaacagaacgatttcaaggtccgccgtctgcgatcatattgacgcatggtcacttcgaccatgtaggaaccgttattgaactggaacaattctggggtgtgccagtgtatgctcatccgcttgaaattccgtatttaacggggttaaaagattacccgccagcggacccttctgtaggtggaggtctaatgtccaggttgtcatttgcttatcccaatgaggcaatcaatctggatgatcggatattcagtctacccaaagatcattccgttccaggcgtatcaggatgggagtgggttcacacgccaggtcatacgcctgggcatgtgtcgctgtttcgagaagcagaccgtttgttaattgcgggagacgcaatcatcacagtgaagcaggagtcgctgtggagtgtgttgcttcaggacaaacagttgcatggcccgccatcttatttcacaaccgattggcaggctgctcatcaatctgtccagcatatcaggcacctggagccgaaacttgcgattaccgggcacgggcatgccttgagcggagatatgctgagtgaatccttgaagcggcttgatctggactttgaagagagcactgtgccggatcacggcaaatatgtggattaattgaaccatcatatgaaagacagcagagacagccgtaacgtattgcagctgtctttttcctgtcttttttgtttttctattatgaatttgttctctatcatagattggtattttgcgctcgggcatgatatagtcgagccgtataatataaccttagtatgcaggaggtacatataacgatgacacagcaaaatgcagcatttgaagaacaatttggagggattccggccgtttggcttcgttttaatcagtttgaagcggcagttattcctagcgtgggtgccaacctcgttgcttttcgtgatacagaaaagggttttcgttacttgagagaaccgaatcaggatcagatggatgagtttatggctgcacctgcggtctatggaattccgattctttctccaccgaaccgttatgaggatggacgtttcccctggaatggtaaagtttatcagttgcctgtgaacgaaccggctacaggtaaccatttgcatggatttttgcatgatgccgagtggaaggttgagggatacggttctgatcagctggagagttatgtgttgcttagccaggacgtgaaagaagggcatacattccatcagtacctgccgtttacgttcacggtgacgcttcgttactctttgagcagccaaggacttcagcagcaattgatcgttcgcaacaacgggactgaatatatgccgaatttgtttgcattccatacggcgattgctgtaccttttgcaccggacagtcaagcctcggattacacggccaaagttacgattggacaacgtcgtgaattgaacgagcgttctctgccaacaggacaatttcaaccgcttacacctgaggaagaacaattgaagaaagacggggttagtccgttctttgctgccatggataatcattacacggcggagccgcagaatggacgtaactatatggaacttacggatcaccgtactggagacaaactggtatacgatgtgggtacctcctacaagcactggatgatctggaacaataacatgggtggcgaattcttctgtcctgaaccacagatgaacctggttaacgctcctaatgttgaaggcatacctgcagaagaaatcggattgatcggtttggaaccaggtgaactattcgaacagagcagccgattgtatccaattgcgtcacaaaaataattcacgctcgttttgcgctacgcttacaattttgtcgaaaaggtgaaaacctgctcgtaaatcatgtataatatgacgagatacacaagctttgtagagacccaaaccatctttttggaggaggacaagcaagtggaataccgcattgagagagatacgttaggcgaaatgaaagtaccagccgacaggctgtggggagctcagacgcagcgcagcaaggagaacttcccgattggcaatgaacatatgccgatggaagttatccgtgctcttgccattttgaaaaaaagtgctgcggccagtaaccataaattaggtaaattatctgcggctaagtccgatgctattgcttatgcagcagacgagattattgcaggccgaattgatgaccatttcccactggtagtatggcagacgggaagcggaacacaatccaatatgaacgtaaacgaagtgattgccaatctggggaaccaactgctggagcaaaagggcaaggaagagcgtctgcatccaaatgatgacgtgaacatgtcccagagctccaacgatacattcccaacggctctgcatgtcgcaggtgttctggctgttgaggatcaacttttgccagcaatcgcggtattgaaagccacttttgcagacaagtcggaggcattcaaggatattatcaagattggacgtacccacctccaggatgcaacaccaattacgcttggtcaggagatcagtggttgggaagccatgctgggcaagagtgagcgtatgatccgtgaaagcgtacagtatctgaaggagcttgcgatcggcggtacagctgtcggaacgggcattaatgcacatccggactttggggacttcactgccaaggagattggcaaacatacggggaaagattttgtatctgcaccaaacaaattccacgcacttacaagtcatgatgaagttgtatatgcgcacggtgcggttaaagcgcttgcagctgatttgatgaaaattgccaatgatgtccgctggttggccagtggccctcgtagtggattgggcgagatccgtattcctgagaatgagccaggcagctccattatgccgggtaaagtcaacccaactcagagcgaggccattactatggtggttacgcaggtcatgggtaatgatgcagcgattggttttgcggcaagtcagggtaattttgaactgaatgtattcaaaccggttatcatctataacttcttgcaatccgtgcaactcctggcggactccattattgcgtttaatgacaagtgtgccgtgggcatcgagcctaatctggatcagattgaacataatctgaacaattcgcttatgctggttacagcgctcaacccgcatattggttatgagaatgcagccaaaatcgcgaaacttgcacataaagaaggcttgtctttgaaacaggcgacgttacaaacgggcctgcttaccgaagagcaatttgatcaatatgtcgatccggccaaaatgatcgctccaaaggcctaaaatcagccgaaatgagcaatatagatcactgaagaggacgacctgcacaagcaggtcgtttttcttatgattaccgatgaacttaatgcttgtcagactatacgtatacatataaactacatatgcaccagttttaatttaattatgggattcgtatatatttggaggtttccgcgttgtcaaaaacgagaagatttacgatacgctccaaaattttattgggctatcttgtggttgtgcttttgtttggagctgttctgttagtgcttacggcccaaattaatgtgttacagaaggaaaatgattttatctcccatcatgatctggaagtacataatctgaccaacgcgattgaaaaaaatgtcttgaacatggagacaggacagcgtggattcatgattacaggtaatgaaagttacttggagccttattcccaaggcctatcccagtggagttccaactatgatcagttgaatgctctcattagcgataatccttcacagcagcagagtctgcaaagcatcaaagctcatattacacgctggattgagatcgctggggagccgtcggtggacttgaaaaagcaaggggatcaagcgaaagttgttgcattctttcaatctgatccgggtaaaactgaaattgatctgctgcgctctcaacttacaaccttccgtaatacagagatcgctctgaccgaggcgagggttactgaacttgccagacgtagctccacactgctgacgattatgtacacgctgtggggtattattgcagcattatccattgtagccgcgattgtgatatccggaaatatcgtcaaaacgttgcgagatgttatgcagaccatcagtgatatctccaaaggtggaaacctgaagcagcgaattcaggtgcgaacacatgatgaagtgggagacctgggccacgaaaccaacaaattactggatgaagtacaggaacagaatcgggtcaaggaccagattacaggcattgccacactcttacagaacccgaccaatctggaaggattgtcccgcttgttcctgaacgagctagccatgttgtttgaagttccctatagcgtattatattactggaaagacaatcgactgctgcgcttggctgcatatgctggggatggagagaaagaacgttcactcggtaaagtgtcgcttgctccgggtgaggggcttgtaggtcaaagtgctgtggagaagcgagttctacgcatgaatgatctgccccagaactatatccgaatctcttcgggtcttgggtatacatctgccacatcacttactgtagtaccggtcctcttcgaaggcagaacgattgcggtaatcgagcttgcttcaatgaagccgttgcaagagaatgatatgaagctgatgcaagaactgacggatatttttagtgtttcactacactcgaccgtcactcgcatggaattacagcaattatatgatgagtcacaagttctaaatgaagaattacaggcacaatcggagaaacttcaggctcagaccgaagagatgttgtctcagacggaggaactgcagatgcagaccgaagagcttcatatgctgaacgatcgtctggaagtacagaagagtgctgcagagacatcagccaatgaactttcggttgtggcagatcagttacgaacgagctcggggtacaaatccgaattcttggcgaacatgtcccatgaactgcggacaccgctcaacagcatgttgattttatctgagatattgtctgaaaataaaaatcaacacttgaatagtgaagagcagaactatgcttcagtcattcacaaatcaggaaaagacctgctgaatctgatcaatgatattctggatctatccaaggtggaagccggacagatggaagtggatttcgatgatgtctatctgggcagtgttcctgaagttatgaaccagtatttcctgaaaacagcggaacagaaaaaaatagatttccggattcagctccaaagtcctttaccggaaacgatcgtgacagatgagatgagattgcatcagatactccgaaacctgctctcgaacgcattcaagttcaccagtgagggtgaagttgccttaaccatctccaaaatgagtctggctcatcctgaattgaaagaccaagagaccgacgtgattgctttctccgtcagtgatacagggattggcattgcggaaaacaaacttctacagatcttcgatgctttcaaacaggcggatggagctacagcacgtaaatacgggggaaccggacttggcctgtctatctctcaatcgcttgcgaatttgctggggggttcaatctcggcaacaagtcgtgaggggcagggcagcgtgttcacgctattcctgccactgcgaagagatgaacctgagactatgaatgcatcgcggttgttcctgaatgaggtggctaccactacacctgagatcaataagcttccttcaatcacttccggacaatcggatgttttattgacacctctggaagaagcgttgctcagcggacgccaagtacttgtcgttgatgatgatatacgtaatgtatatgccctggctaacgcccttgagcaatacggtatgcatgtcatttcagcgcagaacgggtacgaatgtctggaattgttggagcgtggaggagtcaaacctgatatcatcatgatggatattatgatgccggaacttgatggttatgagacaactcgccagatccgtgaacgacttggtctgactcagcttccgattattgcgctgacagccaaggccatgaaagaggatcgggagaaatgtattgcagcaggtgcttcggactatctcagcaagccattgaatatcaaagatgtattatcccgtatgaaattatggatgaatcacgaaaccatggaaatctgatctaaaaacctatgccgattacaggaaagtgcgctgtaattaggtcataggttttatttttttgccgtgtaagctttattcagaaaattgatgttataatacttaacaacaaataaaagttgaatgcataaatatggatttaattagaaaaacaatgcaaaatttagtttcgttaaccagaatgacataacattgtgttatatatatgggaggtattgtccatgcaacttacggttaaagaggctttactggtgtacccgttgtcagaggccaaactggttgcgggtggagaagggacttcacggatgatgaaatccgttaacgtcatggacgctcctgatatcgcggattggatcaaatccggagaaatgttgttcaccaccgcttttattatgaaagacagtgagacggatgcactacgtttgatgcgacgtttgaatgaacgcggctgcgcaggactcggcatcaaactgggacgtttctggcagtccattccccaaggtattgtcgaggaagctgatcggcttcgtttgccactccttgagctcccctttcaattcaccttctccgaccagatgaatgccttgttcaaggctgaacatgaacgtagcaaccgtttgctgcatgaggttgtgcaaaagcagaaaaaattaatgcagtttgcgctgcaacagcagccacatcggaatgtgtttgccgaacttgccacggtgctgaactatccgcttgccgtcattggttcacgtgggcatgtgctgtatggtagtgaaggcattgcaggggatgctgtaacccaaggctggccttggaaatctgtcatgcaccgagtgaaatggaatcaagggagctgtcatcgcgtaccgattaagcaaaatgatgaagagtacgggtcgttgcttgtgtttacggattcagccctatcgcttcgagcagaggaagagctgtttcaacaggctgccgatgtgctggcattttatatggatatgacttatcgcgagcatattaatccgacggtgcaagatgagatgcgtacactgctttcacagtatctggataacaaaatgactgttcaggaattgaccactttgagtgaaaacaaaggtgtacatctattccagggaacttatcagtgcgtattgattacacttgagccgactctgtttgccgagggaaagttgcttaaacagattcatcgcgagttgcaatacaatccgctgatgcaattcacggcctcacagcatttccagattgaggatggcattctgtccatctacacctgtccaacagggcgagattatggagaggagctgtcaagttttctcttgagccgtttcggtgatgttctggcagcgcaagaagcaaaaggagcaccggctccgcgtttctggatcagcaaaatgaaacatgagcccaaatcgctccgtgaagcataccaggagtgtctggatactcgacaactggctcgtcgattcggcatgaaagaccgtgcgttgcaatttgaaatgctcgaatttgcctatgtgttccaacacgtaccggataacatcatggagaactactgcaataaagtactcgaaccactacttgccagggatggtgatcccaatcaggtgctgatgaatacattggagtcctttatcgagaatgacggactgatcaatgaagctgccaagcaactgtttgtgcatcgcaacacggtcacttatcggatggagaaagttggcagcttgctgcaaatggactttaagaaaacgaatgatctgcttaaattaaagctggtatttaccttccgcaagttcgtgcgggacaaagcagctgcaagaccgcacaatgtccaactctagaccgcacattgtgcaacatgacaatgctaacgggtcatacccccgagaaccgcattcccttgatggaatgcggttttttcatgtttgaggacaacaaaagctgatcttcccgtgcacagcaaacaaatcacaactctgatgttatgttatattacaaaattgcgtaaatattgttgtcgcgacattgaacggcacttagaatgaagaacaataatccacaacagaccggaggttctaacatgagcgacttaattaaacttgttaacaactggtctattacacagtttgtgcatgcgtttggcggcttatttgaggaatcaccatgggtggctgagcatgccgggctttcacgaccttttgattcatttgaaaagatgatgaaagtgatgaaaaacgtggttcaggcatcggatgaccaggtgaagttgcagttgctgcgaaatcacccggatcttggagcacgaatcagcatgagcagcaactccgttcaggagcaggctggtgcagggctggattcactttcacaggagcaatataacgaacttcaacaattaaacaaagcatatacaagccaatttggctttccattcatattggccgttaaaggccataccgcaagctccatcctcgaatccatgagacaacgtcatcgccgaggcagggaagaagaactcgagactgcattgaaggaagtattcaaaattgcgggcattcgtttggagcagtggcttgcacagatcggtcatgaacatgagttcgtgagcaagcgagccgcagtgcagcagcggacgatgtattacggcaaaggggatgtgtggatgtaccgttcctacgccaaaccgttgacggggatacagtccattccggaatctccttttatgggacgcagcaatattctgtttggattgaacatcaaggtggctgtgcagggggatgaattcttgccttcttttgcagaaggggataattcgctggtggtggcaaccgattcgatgaagaatttcattcttagacatgcagcggattacacaggggcaacggtggaaggatttcttgcgctggtaagtcggcgtttcctggagacgtatccgcagatgagcaaggttcagatgacagcggaccagattccgtttgaagatatacccattggattagaaggaagttatcgaccgagtgcgctcgtatttcgttattcgcagaatgatcgggcgacagctgccgtggaagcagaacgatcaggagactcgattgaactcagcaaccatttcagtggtgtagccgatctgagactgatcaaggtcaaaggcagtgaatttgccggattcatgcaggatgaatataccactcttccagagacatgggatcgaccgttatttatttttctgaacatcaattggcgttatgaagatccgagagatggcatggatgatcagcgtggacggtatgtagcggcggaacaggtcagagatttggctgctgcggtatttcatgagtgtcgatccgcttccattcaacatctgatctaccagattggacgaaggttgttaagccgatttgagcaactgagtgaggtttcatttgagtccaacaatcggacatgggagacagtgctggaggaagtaaaagagggggaaggcaaagtgtttaccgagccgagaccaccatatggattccagggtttctcgatgacaagggatgatctgggaacagacggccgtgattcctcgaaagaaggtgacgtctaatgtcgatatctggcggacgaattacaacacatgtgctggatacatccaaaggtgtgcctgctgcgggtgttcggatcgagctgtataccctgaagagggatggggagcaggaaagcaagacaaaagtggctgaatccgttaccaatgcggatggacgtttggatgcaccgctgctggttggaggcaagttggagccagccatatatgagcttcaattccatgtcgagagttattacgcacatcgttcgttggaggagctaggccaggcattatggacgattgttccgattcgttttgccgtatcagatgcctcaagccattatcatattccgttattgattgctccagggggttacagtacataccggggaagctgaacatgcacacatccggttctgattcaggaggagggtcatccacatgacaacatttgataccatcatccggggggcccgggtggtgctgagagatcgggtagagcaactggatattggcataactggtgaaaaaataacggaactatccacgcggctgaccgctggtgaagcgacttgcatcatagaagctgaggggcttacagtgatgccgggtgtcgtggacattcatgtacacttcaatgaacccggactcgccagttgggagggatttcgatcgggttcggcagcccttgccgcagggggaatcacgacctatgtcgatatgccgcttaacggtgtaccaccaaccacaaggccggaagcatgggagatgaaaatgaaagcagcggcagaccaatcctatgttgattatgccttctggggaggtttggttcccggcaatcgtgaggaacttgctccactggcagggttgggtgctgccggattcaaggcatttatgtctgagccgggaggcgaaggggaagacatctttgccagagccgatgaccacacgctattggacggaatgcatgaaattgcaacattaaaacgtgtgctggcacttcatgcagaggacgaaggcatggttgccgaactcggtgcaaaaagcattgctgagggaaagactgaaccgatggattatatccggtcccgtcctgtggaagccgaagtcgtcgcggttgcccgggcgttgaagtatggtgaacagaccggttgtgcgcttcattttgtgcacattagcacccgggaagccctgaatctaattgcagaagcaaaacggcgtgggcaggatgtcacttcggagacatgccctcattatctgacgctgattgatcaggatgtggtccgtttgggtgctgtagcgaaatgtgctccaccgcttcgcagctcttccgagcaggagcagttatgggatgcactgacctcaggattaattgatgttattgcctcagaccactctccatgtccggcatccatgaaacaatccgataacttttttgaaatctggggcggtatatccggggcgcaaagcacactgctgatcatgctggaggacggacatcttcagcgtaatatcgacctcccgttgctcggaagagtgctctcccttcagcctgccagaaggcttggtctggagagcaaaggagagattgcgattggcaaggatgcagatctggtcctgattgactgggagaaaagcacaaccctgaacacggaggatctgctctatacgcatcaacagagtccttatgtgggacgtacatttaactgtcaggttgcagacgtattttgccgtgggcagcgtgtttacaactcggaatccggtttgtctcctgaacctattgggcagcacattgcagcctattcctgtagtcccatcgaagcgggaacggaggagacgccatgacagagtctggagtataccggtcatccggtaccaataacgcacctcttcctttgccggatgtggaacaggtggagctgcaagccatgcttgactggctgtcgacatatggtgcggatacacaaggtggcgttacaagactgttgtatgactcggcttggtgtgaagcacaaggtgcccttgcagccaaaatgcaggagaaagggctgtctcccgaatttgaccagtccggtaatctgtatggcacactaaagagtgagggtaaggaatcagcgacgggtgctgaagaattaccgattgtgaccggatcacatattgatacggtggtgtatggcggcaaatatgatggtgcttacggtgtggtggcgggagtcctagcattggagtatttgcagaagcatttcggagcaccgaagcgcacacttcaagtggtatcgttatgcgaagaagaaggaagtcgcttcccttttgcgtattggggttcacgcagtataacaggcataacggctctggaagacgtagaacatttgaaggatcaagacggcattacctttgcacaagcaatccgggatgcgggttttggacccgatagtgcatatagacctgccgcgaaaaattacggtgcctttattgagcttcacattgagcaaggtcaggttctggaacgtcttggacattcgattggagttgtatccgatatcgtaggtcagaagcggttcagtattacggtaagcggggaagcgaatcacgcaggaacgacgccgatgtcctggcgcaaagacgcacttgccggagcagccgagatgattactgtggtaaggagtgtcgcattggatgcaggagaaccgcttgtagccacggttgggcgaatcacggccgatccgggtgttgggaatgtagttgcagcacgggcggtgttttcactcgatatccgccatatccggcaggagagtattgatcgctgctggcaggatatgctccaggcatttagtcgtatcgcagccgagcagcagctcggactggactgggaagaacatctgtcggtaacgcccattcctatgaatgcagagatgatctcagacattcaggatacctgtgagcaggagcagttgtcctattggctaatgccaagcggcgcgggacatgattcgcagatttttcagccggcttgtccgacggccatgatctttgtgccgagtcaggacggtattagtcataatccacttgaatatacagctgaagcagacctgatgcacggttttcaggttctggtccggctactctataaatacggttacgggagttgaatgcagatgtccaactataaagagttatctccgtccttgcggaccattatgaccccgggccccgttgaggttgatccgcgtgtgctaagagcattatcctttccgatcctggggcagtttgacccagagttcacatctttgatgaatgagacgatggcgatgctgcgtgagctatatatgacagataacgagtggtgttatccagtagatggcacatcccgttcaggcattgaagctgtgttggtcagtctaattcagcctggtgacaaagttctcgtcccgatctacggacggttcggacatctgcttgttgaaatctcggaacgctgtggtgccgaggttgtctttttcgaaacggaatggggaacggtatttgatccggaagaggtgatcaaggcgatccatacccataaaccaagtctggttgcgatggttcacggtgagacttctaccggacagatgcagccccttgccgagattggcaaagcctgtcgtgatcttgatattttactcgttgtggatgctgtggctaccattggtgggactccggtggagacggatgcgtggcatctggatgcggtaatgggtggtacgcagaaatgcctgtctgttccttcagggatggcacctctcacatacaacagtcgagtggagcagaaactgatgagccgcaaaacggttgaacgcggactgcgagatgcaaccagtgcgagggcagaaggccgcacgattgccagcaattattttgacctgagccaattgcaggattactggagttcagaacggttgaaccaccatacagaagctacctccatgctctacggtcttcacgaaggattacgtattctgctgcaagaaggattggaggcaaggttccagagacatctggtgaatgaacgtgcgttggttgctggaattcaaggaatgggactacagttgtatggggatatgtcaagcaaacttccggtagtcacctgtatcaccattccggaggggattgatggtgagtcggtgcgcagcatgttgctgaacgatttcagcattgagattgccagttcatttggaccgttgaaagggcagatctggcggatcggtacaatgggattcagctgccaacgcaagaacgtacttcatgtgctgggagcgctggaagctgttcttctccgtcatcgtcacttattacctgccggtgaagcagtgcaggccgcattggatgtgtatgcagggaaggagggtgccttatgttaaaccagatgccaatctccagagaggttatggtcacctctcctcattatctagcgagtgcagttggaagttctatcctccagcagggcggtaatgcttatgatgctgctgttgcggtcagtgcagctctgggtgtggtatatccgcatatgaccggacttggaggggacgccttcttcctgattcatgatggaacgagcggtgagattaccgcttataacggaagtggccgctcagccgcaggcattcatgccgatacgttcaaagcgatgggcatgaatgccatccctcaacgcggtgtgcttagtgccatcacggttccgggaatggtggatgcctggtgggaagtctggtcccggtacggtaagttaccgtgggagcagttgcttgaacctgccgcacagtatgcggaaaaaggatgccctgtatcccggaatctccgactgtggatggaaagggatgaagatttcattatgggccatacaccgctgcgagcggtatttgcgcctttgggtacacttttgcaggaaggtgaactgctgatccagcctgatcttgctgcctccattcgtctgattcagacggaagggcgagatactttttatacaggagaactcgcggatcgtctgacttcagctattcgtgaggatgggggcatgcttgccccagcagactttgcaggccatcggggcgagtgggtgaaaccggtcagtacggggtatcgtggctatgaagttcatcagatgccgcccaactcgcagggattctcgatgctgatgatgttaaatatgctggagcatacggatctgtcctctgtagcacgtacctcaccggaattctatcatctgatggcggaagtggtgaaaaaggcgtttcgtgatcgtgatcgttatctgactgacccggatttcagggatattccgctggatcatctgttatccaagggttatggagaccaactgtggaatgagattcagtctgctccacctgtggcacagccgtttttgtccaaaacgataggtcaggacacggcgtatgcagcggttgttgatagcgaaggcaatgccgtttcattcatccaaagcctgtattttgacttcggtgcagcgtatgttccgggggatacgggagttatcatgcagaaccgggggtcgtttttctccttagatccgagggatgccaacgtactggaaccgaacaaacgctcattccataccctcatgccgggccttgttacacgagatggcaaaccatatatgctcgtgggtacacagggaggagaaggccagccgcagacacaattatcggtgcttaccggagtgcttgattacgggctgaacatccaggaagcaatcagcctgccgcgttgggtgtatgggcgtacctggggcgaagaaggcgatacgatgcgtgtggagaaccgatatcacgatgacgtatgtgcaacgcttgcccaatggggacataacgttgaagcgagagcaccgtgggacggcattatgggacagtcgcaaggcattgtcattcgtgaggacggcatgattagtggcgcagcagaccctagaggtgatggtatggctattgggtggtaacagctacattggacatttataagttcaactagatatttacacgataacagcgatcggaagattggtctgtcatcggagtgcaagtgtaaatatgtatgagttgtaatatatagacagacacagataggggagattggcatgggaacgatcctgctgaaaggcgcacagcttgtgacgatgaatgcagaagaggaagtgttcattggagatctgttgatcgaggataataaaatcaaggagattgcagcgcacatcgacatgcaagctgaccaagtcattgatgctcgtggtaaagtgctgttgccaggtttcatccagacacatattcatctgtgtcagaccttgttccgtggacgtgcggatgatctggaactgatggattggctccgtcaacgtatctggccgctggaagcagcgcatgatgaggagtccgtgtattattcggcaatgcttggactcggcgaattgatctccagtggaaccacgaccattctggatatggagacggtacatcacacggactcggcgtttcaggcgatggcacagagcggcatccgggtcatctctggcaaagtgatgatggatcatggagacgaagttccggaacccctgcgtgaggatacagcaacttcgctacaacagagtgtggatctgctggagaaatggaacgggtttggcggaggtcgcattcagtatgctttctgtccacgcttcgttgtatcgtgtaccgaagaattgctggtagaggtgcgcgacctgtcgaataaatatcatgtcaaagtccacacccatgcctccgagaatcgcggagagattgaactggtagaacacgaacgcggaatgcgtaacatcgtatacctcgatcatatcggtctggcgacccccagattggtactggcacactgtgtatggctgagtgaggaagagaaggagatcatccgcaaacgtggtgtcaaagtcactcactgtcctggatcaaatatgaaactttcctccggggtagcagatattccggatctactgaatcggcagatcgcggttgggatcggggctgatggtgctgcgtgcaacaacaatctggatatgtttcaggagatgcgcctcacggccctgatgcagaagattcctcatggtccaacagtgatggatgcccggaccgtattgcgtatggctaccatgggaggagcagaagtgcttggcttgtcgaaggaaattggcagtctcgaagtgggcaaaaaagcagatatgctgctgctggatctggatgatttccacacgtacccttcctatgagacggatgtctattcccgcgtagtgtattccgcaacacgtagctgtgtggataccgttattattgacggaagtatcgtgctcaagaatcgtaagattcagacgattgatcgtggcattgtgctgcgtgagtcggataagagtattgcaagattgatgaaacgtatctgatcgaaggaagtttatgcaattccagaaaggatggagaccgctatggaaatgcatgatctgtgtgcaattgcagcccgtgaaacgcgctgcgtgctcgcaacagcgattaaggtagagggtcatgcttaccgtaagcagggagtctctatgctgttgactgaggatggcaaaatggttggcagtatcagtccgggatgtctggagagtgatcttcaggcccgggtgagccatgtgctggatacgaagcagatggaattcgcggagtacgacatgcgtcccgaggatgatctgtcctggggggagacgattggctgcggcggactcgttgttgtgttgcttgaacctgtgtgtggtgaactccgagatacgttgcagaagatgtatgattgttttcaatccggcgttgcaacagcgttaacccgaacgttccaagatgattatacgaaggttcaatatggctggaaacggattgaaccaacgggtactcggcgccagccaatcttgcgtccttcgctcgtcccacctcatgatcgcgtgacgaacaataatccagcttcattgcaggttgatgtacaacacagcagtggtaatatcaagcatgaacatacggcatcaaaacaatattctcccgacatacctcgccttacgcttgtgcctgaagtggtacctgttttgtcaaacggatctcactcttcccatctatccggtgattcacaacatatctctgagtctgatgctgaaatagcgacaaacaacacggtttcaacgaatccctgggacctcccgcagcaacttacttcgctgtacacgcctaaacctcgcctgattatcatcggagccgggaatgatgttattcctgttgccagactcgcccaatccgcaggattccgagtagtcgtagccgattggcgagagtccttatgcacctcggaaaggttcccagaaactgaacttatacttggtttcccatgtgagatcatgcctcagttaaacgtaaacaacggagattatttgattttaatgagtcacaattttccccgcgaacgtgaactgttggagatggtagtggactgtgagtacgcgtatcttggcatcatgggttccaaaacacgaacagcccgtctgctggatggcttaccaccgttgaaatatgtgcattctcccgttggtttgagcatcggagcagacggtcccgaacagatcgccatcagcattgcagcggaattgatcgcatgtaaacataaggtttcttccttgagttctgaggtgcagagggggagcgttgcacatgcgaatgacgggcatagttctggcagctggtaagagtcgtcgccttggtcgggataaactctcggttgtcatgcctgacggaaggtcactggctgcatggtcattggaagctgcgttgaattcggagctagatcaagtggtctgtgtggtcaaaccggaagattcgctggcatggctacctgtaaaatggtttgattctgctacctatgcctaccatcccacagcgagacttcgaattgtggtctgtgctgactatgcctgcggcatggccaattctcttcattctggcgtattgtcggccatgcagtacaaaccggagggcattctcatgttactgggtgatcagcctttattaaaaacgcaggatattaatcgggtgactacagaactggctacccacaagttatgtgactatgtcgcagctaccgacggtgagggaggcaagccgcccgttgcttttcgctcccatatgttcggccctctgttgtccttgcatggagatgagggggcacgcaagattatgcgcagcgctaactattcaggtgtacatgtaccactgtctgagactagtttctgggatgcggatacagaaccggaattggaacgcattctgagtcatgtatatgaatcacagcagacagactaaataacaggagaagattattaactatgtataatttaataacatgatcaggtcagccaggcagtctggttggcctatttgtcttcttttcacgtatggtgaaagagagccaatgttagctttcgatagatcgtgatgcatcaagcacaaataaaacgcaggttttatacatttatccaaaacgatgtaaaggtaattgacgttgctgctgaactctcatatgatttgaagaattatttggatcagacggttgaatttcctgcccaaggaagagagagaaaggggatgcagccatggtaacaccggcatacggttctggagccatgccatcggtatggcaacctgagaacctgcaagaactgcaaacgttaagaagaagactcaaaggaatatgttgtttcacggcaggtggaacattgctacgaacccattgggagggtggcttggttccagcgcctgaacacatgattagtctggctcgtattcctgaaatgagcggtatatctattcgtggagatgagatagtcattggagcaatgacccgattaaaggaatgtgctgcacaagcgttgctgcatcaactgccgattctgcaagaagctgtgaatgcaattgcggccccttccattcgtaatgtggcaaccattggcgggaatattgtgtccggagtaggggatacgctacctgctttgcttgtatatgatgcggagctgcactggttgacagacagcggcattgagatccgtagagtgtcttcctggctgcagggtggacgggatggcagccgtaatccaggggatgtattaatctcgattcatattccaatgagaccgtcgcctctgtttgatgtgaacagtgagcacagacctgttgcacgagaagtttccttttaccgcaagctgggtcgacgggagacgttcagtgcttcgctggtgacggttgcgttatacggtgagattgatttggataaccgctggaccaagattgcgattgcggctggtggaggctcaggcatggcgatgcgacttctgaagtcggaacaacagcttcttggtagcgaagctactgtcatgcaagcagcaactcttgcagctgccgtggctagcgaatttacgacttatggcgatgcatttgcaacggaacattatcgcaaacagaccgcaggcaatatgcttggtgccgggttatgggaagcacttcacgaatagaagacttcgatcaagcaaaggaggagaggcatcatgctgctgaatcggaaacagagcgggaaacgctggcacctgcggccagatggggcacccaaagttacaggccaacttcaatatctgacggatatgacgttacctgacatgatccatggcagagtattgcgaagcgaatatccttatgctcgtatactgtctatagatacttcggaagctgaggcattggaaggtgtctatgcggtgctgacctccaaagatgtgcctggtctgaatcgttttggcatagcgaccccggatcagcctgtgttctgcgaggatattgtacgttatgttggggatgccattacagcggtagctgcggattccccggaacgtgcggcgcttgcactggatgcgatccgtgtagtgtatgaggaactcacacctctgaatagtacagacgctgccttggctccaggtgcaccagagctgcatgagcatggaccaggtaatgtgctgcatcggacggagatcaaacgtggagacgccgagcaagcttttgccacttgtgatcatatcgtgacagagacgtattatacgcctcgccagatgcatgcgtacatggagacagaaggtggcctgtttgtcccggatgaagagggaaggctgaatgtatacgcggcaacgcaacatggttataaagaccggatgcagcttgcacgcattattggctgtcctgaagaagatatccgggtggtgtcttcaccgattggtggttcgtttggcggaaaagatgaactaaacgtacagccctatggtgcactactggccttgagatgcggacgtcctgtgaaaatgcataattctcgtaaagaatccgtgcgtgcaggactgaaacgtcacccaatgaagattgaaatgcagaccggcatgagtcgagaaggcatcatccaagcgcatcgtgtccgtataacagcagataccggagcgtacgccacacttggtgcacccgtgctgaacttctgtaccgagcattgccttggaccgtacgctattccaaatgtggatgtggaaggcgtatctgtatatacgaataacgggctgtcaggtgagtttcgcggatttggcgggaatcaggcgatttttgccatggaaggccagatggatcgacttgcagcaatcatgaacatggacccttgggagttccgcagacgtaatatgagggaaaagaatgatcctggaccactgaatcaacgcattctggttacggatggactgtcccaagtgtgggaggcattggatcgctccgaactgtggcaaaaacatcagagtcccccggcagatcctgctctgccgccgtggatcaaacgcggagtcggagcagccatcgccatgcatggtgcagggctgggttatggcattccagatcctgcaggaggccgcctgtccctgaacaacgaaggcaagattgaggtggcgttcagctacgaggaatttggtcaggggctcattgcaacgctggaaattatgttatgtgatctgttccaatgcagtacatcggatctcagtattatcatcggcgatacggatcgtgtgccacacagcggatcaagcacagcttcacgttcaacaacgatggcatggatggctcttcaacgcttgcagactccatttcgttcccgtgttctcgctgtcgcgtctgaaatgtccggcgttccggcagatgaactggtgacagggcctgggggtatatggcgcaaaggccagcttcctgccgaaacttcagaagtagaaacagaatcaggcttattgatctcgtatgctgaactcgcgacgcagggcgaagccgatgaatggattttcgatacaaagtttgattacccaactacgccagacaacgtggtaggcgggcattatttgtatacgtatgcggcggttgcggcagaggtggaagtaaatactttgaccggagaaaccaagcttcttgatacgtgccatgttgttgcggcaggtccagttatcaaccctatgggttatatcggacagattgaaggcggcagtgtcatggcgcttggattcacgttaacggaggatgcggtcatgcaggacagccgttatgtaaccacgaacctcgacacgtatctgatcccaaccattcaggatattcataccaatctggaggttgaggctattgaagacttacccgaaggtgatgcgtttggtcctagggggatcggtgagataggctccgttgcgcttgcgccggccataacagctgcaattcaccaggcgacaggcgtatgggttaaccgtcttcctgtaccgagggaacaactggtcagacctttaaatgtacctttgcaggaaggagtgagtccatcatgagtaaaccacttgagaatcattggacagccgttgtgaatggcgaacagaaacatctggagatcgcgctaacgacccgacttgtcgatgtgcttaggactcatttgcaactaacgggtaccaaagtatcctgtgaagttggtcgctgcggcgcatgtatggttctgatggatggagaacccgtgaattcctgtcttgtcatggcttatcaatgtgaaggcagtgacattatgacgattgaaggtctgcacggcgaggggaaaggcactctacatccgattcaacaggcttttgtggaggaaggtggctttcagtgcggctattgcactccgggcatggtgatctcaaccaaggcattactggatgcacatcctgagccttctcaagaacagattgaaacgggattgtgcgggaatctgtgtcgttgtaccggctacggtggcattattcgggcggtacgcaaggctggggaacgctgtgtgataaaggaaacgtctgccgaggaaaccgttagttgagccgggacctaggcccaagatataagcaaggtcattgaagaaacatacgtcaaaaagcatccgaataggaatgcttttttttgttgtttatccgtttttctttcaagtacacatctaatgtgagatgaagtttcatacgctaaattgattagattatgaaccgttttcgtcaattatcaagtcggatgagagaaaggagatataatgttcaaagtactgttacaaaagaatttcaagcattatcattcaccatatatttacaaaaattcatgcacatgctatgtttaaaatgaaagcgccatcatgaatgggttcattgacatttcattatcatatttcacttgggaaggaagatggaattgatgaaaaatttgctcaaaaaggcaaccgcaatgatgctggcattggtcctactgcttggattaatgacagcgcccgttcatgcagacacaccattgttcaccatcgaaagcgaaaatgcgcagctgaccccggatcttcaagtggttacttcaatctatgggcagcccaagcccggattctcaggggccggatttgtctggatgcagaactctggcacattaaccttcacagttactgtcccggaaaccggcatgtacgcaatctccacacgatatatgcaggagctcagtgcagatggcaggtcacaaaatttaatcgtaaatggtgttacgaaaggggcgtacatgctgccttacacgacaacatggtcagacttcgattttggctttcacaagttgaatcagggtgccaacacgattgagctgaaggctggctggggcttcgcgtattttgacaccttcacagtggatcatgctgatttggaccctttgaatgtacaaccagttctcactgatcctgaagctacaccggaaactcaaattttgatgaattatttaacggaggtatacggaaacaacattatttctggtcagcaagagatctatggaggagggaatgacggagatacagagcttgaattcgagtggattcatgatctgaccggaaagtatccagctatccgtggctttgatctgatgaactataatccgttgtatggttgggaggacggtacaaccgaccgcatgattgattgggtgaataaccgtgaaggtattgcaacagcttcctggcatatcaatgtgcctcgtaatttcaatacgtatgagcttggggactttgtggattggaaagaggcgacctacaagccaaccgaaacgaattttaatacagccaatgcggtaattcccggtacgaaagagtatcaatacgtgatgatgaccatcgaggatctggcagaacaattactgattttgcaagataacgatgtgccagtgcttttccgtccgtatcatgaagcagaaggcaacggcgggctgaacggggaaggtgcatggttctggtgggcttcggcaggcgcagaagtgtacaaagagctatgggatctgctgtataccgaactgaccgagacgtatggcttgcataatctgatctggacctacaacagctacgtatacagcacttctcctgcctggtatccgggcgatgatcaggtagatcttgttggatatgataaatacaatacgatctacaaccgttatgacggtttgtctggcgtaccgaacgaggatgcgattacctcgattttctataagcttgttgagttgacgaatggtacgaaaatggtagccatgacggagaacgatacgatcccaagcgtgaaaaatctgacagaggagaaatcaggatggctctacttctgtccttggtatggcgagcatctgatgagttctgcttttaattatccggcaacattgaaaacgctttatcaaagtgattatgtcattacgttggatgagctgccaaatctaaaggttaacaatcccaaccccagtgcatccatcacacctggaaacgtcgaatttgacaaatacacacccaatcaaagcgataaaaccgtaaccgtgaatgcaaatggcaatacgctgactgctctccgggcaggcaacaatgcgttgaccgcaacaacagactacaccttgaacggaagcacattgctgttgaaaaaagcttatctggcaaccctgccagttggtgagcattcgatagttctggattttaatcaaggccaggaccctgtgttaaaagtcaaaattgtggattcaacaccgggtacaaatgctgtgatttctcctgtgaatgcaacatttgataaagcgacgaattccgcgcaggatattaccgtatctctcaccttaaacggccgtcagctcacaagcatcacaaagggggatgctacgcttgtatcaggtcagaattatacagcatccagctctgctgttgttctgaacaaatcctatctcgctacgctgcccttgggtcagaatgtattgacctttcaattcaatggaggaaataacgctgtgttaacggtgaacgtcgtagatagcacggttactgtgccagcaggggatttgacgattcaagcttttaacggcaatacaagtgcatcgaccaacggcgtctcacccaagttcaaattggtcaactcaggcaattcggatattccgttaagtgatgtaaaaatccgttattactatacaattgacggggaggaagctcagagtttctggtccgactgggccagtatgggcagtgcaaatgtaacgagcaatttcgttaaactggcgactccagttgccggagcggatcattatatggaagtgggctttacaagtgcggcgggatcactgaatgcgggccagagcgcagagattcaaacacgcttttccaaaaacaattggtcgaattacacacagactaacgattactcgttcaaggcaacaggtagtcagttcgcaaaccatgataaggttaccgggtatgtgaacggtcagctggtatggggaattgagccgtaaaggtagatagcacgtttaatgggctggatcaggggttgaacctctgattcagcctttttatggtgtagaaggtgtacaccgattagacggaatgttctttttcacttgtagtatgtgacgatgtatccatgtctgttaatatgcgatctattatctttttcgtatggcccatgatgaactgaagaagtacacctgcacaacatacggttatcaacgttccaaccccgattggcccactgagcagaaacgccagaattaaaaatacaaggtaaatgaacgttctcgatacaaataagggagttcgagtgatttcatgcaagattaatgttaagcggtcaatcggaatgggtgcaaaattggtctgtaaaagccctagatgatgtgatagccctaccagaagtgcatcaaacggtgaggtgcccagttcagattggatggtaagggaaatgccaagtgttaagattagaatacctgcgacaaaaagtacatatttcaattcattcaacctcttttttaatattatgttgcaaatacaacaaaattaagctaaattcaatgtaacccttttttagtgcatttgcaacaaacgattaacttgttaaaggaatgtgaatatagatgacgattcgtatagagagatgtaccattgaacatgtatgtgaactgcaggagattagttatgagacgtttaatgaaacgtttaaagcgcaaaattcacccgaaaatatgaaagcttatctggaaaaggcgtttaatcgggagcaattggaaacggaactgtccgtggcggattcacaatttctttttatttatgtcaaccataaagtggcaggatatatgaaggtgaatatcaatgatgctcagtctgagaagatgggcttggaatcctttgagatcgagcgggtgtacatcaaaaaagagttccaaaaacatggcctgggtaaggtactgctccataaagccatagagatggcaacagaacaacacaaaacgaatatttggttaggcgtgtgggagaaaaatgaaaatgccatcgcattttatgaaaagatggggtttgtacagacaggagcccatgcctttgttatgggagatgaggaacagattgattttataatgaccaaaacgatactgtaacgggatcatcgagggaaaagcttgggagaaaaatgctattgagcagaattcttttgagcttttttatgttttgccagaaccgttgaataataaaatgaagaaattgacgaagtttaatacataataaatattatgtaaacttattattttcgatggccttcataagctgcatctatggctttagcaaaagttaaaggcctgattaatatataattggcagtataattttgctcaataatcttgaaggtaataggctgatctcaaggatagtcattacaatttattagtttatttctacgtttggacagtcagccgaaaatcgttttcgttcgtggtttgttagatatcgttaaattcttaataatcagtataaaagttgtatatacctcatgttaaaagaacttttcgcgcatgaaacggacgtgttaatccaccatgttaaattatttagttttcgagcggaaaatggaaaataaaattaatattttaagtaagaaatcaggaggattggactcttaaaaccagccgaaaaaggagcgaaatcgatcaatatattaattggataaataaggtatatatcgttaaaaaggcgctactacgccgattatagatcaatttcatatggatttgcgatggatttagtaccgctttcacgttatgcttttggaaattggaaaggaagtgggaaaaatggaacgcgaactggcgttggaaattgtcagagtaacagaattggctgcgttagcttcagcaccctggatgggacgaggcgacaagaacagtgcagatgaagcggctactttggccatgcgcgccatgttcgattccgtgtccattcgcggcacggtggtaatcggtgaaggagaaatggatgaagcacccatgttgtacatcggcgaggaagtgggcaacgctgaggggcctgaggttgacgtggctgtagacccgctcgaaggtacagaaatcgtggccaaaggactaaacaacgctctatcggttattgcagtggcgggaaaaggtaacctgctccacgcaccggacatgtatatggagaaactggcggtagggcctgcgcttgtaggcaaggtcagtattgaagacccggttgaagtcacactggagaaagccgctgccgcattgaacaaaaacatctcggacctaactgtgatgattctggatcgtgtgcgacacgagagtaccatcaagacgctacgcaaggttggcgtacggatcaagtttctcagtgacggtgatgttgcgggtgcaatggcaccggccttcccggaggcgggcattgatctgtatgtcggatctggaggagcgccagaaggtgtgctggctgccgcagcgctatcttgccttgggggtgagattcaaggtcgtctgatgcctgccaacgcagacgaattccagcgctgcttgcagatggggatcgataatccttacaaagtgttaacgatgcaggatatgatcggcacggaggatgtcatttttgccgcaacaggtgtgacgccaggtgagatcttgggaggggtacggtatcttgcagatgatcgggccgagaccgattcaattgttatgcgtgccaaaaccaaaacaattcggtttattcgttcccaacacttcctgccgaacaaagaagtactgcacaaagtaagacagctgcaatccacgccagaaccctcggatcgcattccgagtcatgcgaaaacaatggagcaggctgagtttagtcaatcctccgttgatcttggcgttacaacgacgttgtgagctgcactcccataattgaacaaacaggatcaactgaaatcgttgtatttaaggttgtatttaagtatgataagtaacttgaacctctaagattacagagcatgaagttaatgaaagtaccatctctggcaagataatagtgagggcttggattaacccaaaccctcattattttttgtgttaaaagcattgacaacggttacatggcatgagaaaatgtacgcgcgtacataaatatcgatttttaattactatttgatttattgatgagctagaagggggtgaaattcatggcatctcgtaaagaagtggctgatcttgcgggtgtttccgaggcgacggtctcccgggtgcttaatggggtaggccctattaaagaagagacacgccgcaaggttcttgaagcttccgaacagttaggctatgtgcccagcgcgcttgctcgcagttttgccagaagtaaaagcggaaaccttggcgtggtattaccttatgttccgaaggcgcatctgttctcggcgtatttcttctcggaaatgctgagtgggattggaagcaaagccagagacaatagcatggacctgttggttatgttccgaacacccggtgaagtgatgaattatacggatttgttccggcgtcagaaagtggacgcttgcattatccttggtgccagagatgatcatgaagaactggcggccatgcagcaacttcatcaggaaggacacccattctgtgtcatgaatcagcattttgagggccaatcgttcatggaagtggatgcggatcatgtggaaggaagcagacttgccatacgtcatcttacggatcaggggtatcgcaaaatcgcttttctcaatggtccagacagctattccaacagccaggagcgaatggaaggcgttcgtcttggcctgcaagaagcaggtatggagctggagccgagtctattgcttaaagggaattatagtagaagaagtggcattgaggcggcagcgattgtagcagatcgcctacatgagattgatgctgtatttgcggccaatgaccggatggccattggtgtcatgcatggtttacgtgagcggggaatagggcctgcggattttccggcatttgtgggttatgacgactccgatgccgccgagatggcggttccgccgctgagcagcgtcagggttccattttttgagatgggtgaacttgcagtattgaagcttatgcatgggtctgtgggtgatacacatgaagcgaataactctgttgtagcggtacccaaatctgcgagagcgttgttgcctaccgaactgattatccgtgcttcttctatccgtcaatagtttattggtacacatattgaaagactttttattattccaaaggaggaaatgaccatgtcaaatcgtcttcgtgtcggaatggttggatacaagtttatggggaaggcccacagtaatgcctatcgcagtctgccgatgtttttcccgtctgctccgttgcagcctgagatgtctgtgatctgtggacgtaacgagcagggagtgcaccaggcagcgaatcagttcggttggtccgaaagtgtaacggattggcgtgaactggtaaagcgggatgatatcgatctgattgatattaacgcaccaagtgatgcccataaggaaattgcgttggaagcagctcgtcagggcaaacatctgttttgtgagaaaccactggccctgtcacttgcggattcgcgtgagatgcttcaggcagctgaggatgctggagtcgcacatatggtcgggttcaactaccgtttctcaccagcggtgcaattagcgaaggatctggtggagagcggacgactgggtaagatctatcattttcgtgcttttttcttgcaggactggatcatggacccttcgttcccgttggtatggcgtttacaaaaagaagtggctggatccggttcccatggggatctgggcgcgcacttaatcgatctggctcgtttccttgttggtgaattccaggaagtcatcgggatgagcgaaacattcatcaaagaacgaccgcttgcagccgagatgaccgggctaagtgcaaagggcagttcgaatgcggatgcaccgaaaggagaagtgactgtcgacgacgctacattgttcctggcacgattcgcaggaggggcgctgggcagcttcgaggctacacgttttgcagcggggcatcggagtacaaactcgtttgagattaacggcagtctcggcagtgtacgatttgattttgaacggatgaatgaactggaagtctatttcacaaaggatgaagaggacgtacagggattccgccgtgtactggcaaccgatccggcacataaatatgctgaagcctggtggcctgccggacatacgattggattcgagcacacgttcacccatgaaatgctggaactggtaacagcaatctctgaaggacgccaaccatcaccgagtttccacgatggggtcgcttgtcaggctgtactggaagcagtagaacgttcggtaacagaacggcgctgggtgacgcttgaagagatgtgagcaagcaagacagtgacgtcagaaataaggttgaacacataaaactaggtgaaagcgagtgaataaacgatgagtaaagcactgattgtatggggcggctgggatggacatgaaccggagcaggtagcaacgatatttgagcgtattttgaaggaagagcagtttgaggtggaagtctcgaatacgttggattcttatgcggatgcagagaagctgctgggtctggacctgatcgtgcctttgtggacaatgggacagattgagcaggaactggtcaataacgtatcggcggctgttcagagcggcgttggcttggctggtcttcatggcgggatgtgtgatgccttccgaaataacgtagactggcagtttatgacgggtggacaatgggttgctcatccaggcaatgatggtgtggagtatatggtaaacatgaagcgtggctctagcccgttattggatcatattgaagattttcaggtgaaaagtgaacagtactacctgcacgtagacccggcagtggaagtgctggcaacaactcgttttccagtggtgactggtccgcatgcagcgaatggccccgtagatatgcctgttgtctggacgaaacgctggggcgcagggcgggtattctacaactcactgggacaccatgcagacattgtagacatgaaacccgtgactgaaatgatgcgcagtggattcaaatggacagcagcaggcaaagaacttgccaagagtcgagtaagttcagcaaccgaagtgtacacaggtatggcggacaaccagaactaatgagattatagtttgattgcaaacgtaacttcagtgttaaccattcatccttaatggataaaccatttctgatccacggcgaagggagccccaggcatgaaaacaatgaaagtaggcattattggctgcggtaaaatcagcggaatttatatggaaaactgtcaccggttcgaggtgctggaacttgttgctgttgcggatctcgaccggaaacgtgccgaggagcaggcagcagcctataacgtgcctaacgtatacagcgtcgacgaaatcttggctgatcccgagattgagctgatcatcaacctgacgattccttccgttcatgcggatgtatgcttgcgggcgcttgaatctggcaaacatgtgtatgtagaaaaaccgctcgcggttacccgtgaagaagggcaggccgtgctcgaaacagcgaagcgtaaaggattgcttgtgggttgtgcaccagaaacgttctttggttcaggtatccagacttcacttcaattggtggaggaaggggtaatcggcaagccggtggcggcgaccgcatttatgatgagtcgtggtcatgagcactggcacccagatccggagttttattacgcgtcaggcggtgggccaatgtttgatatgggtccgtactacctcaccgcattggtccaactgatgggcccgatcaagtcgatcgcaggtatgacaggtaaagccatggaagaacggacgattacgagtgagaaaaagaggggccagacggttcccgtcgaaattcctactcacgttaccggtctgttacagtttgaacagggagccattggcacactgattacaagttttgacatatttggcggaagtgcattgccaccgattgagatatatggcacgcacggtacattgcaggtacctgaccccaacacctttggtggtccggttcgttaccgcttgctgggtgaacatgaatggacggaagttccgcttctcccaggatatcaggaaaatacccgtggcatcggtgtggcagatatggcctatgcagcacatagtggacgtgcacaccgtgcgagtggggaactggcataccacgtacttgaggccatgtgggcattccacgattcatcagatgaacagacattctaccagatgaaaagttcatgtcagcgcccggctgcgttgccggtggacctgccattgtatacattggataaataagatagccattatgctttatatcatgacgaacagcccttttccttcgaacaaggaaaggggctttttttattaaatcaaaaaattctggggataacagcgatcggaaggttgttctgtcatcggagtgaccagtgtaaatattctttagttcaacttatataactatttagggctcaaatcccgcctgactgatccagatctcatccttggcaaaatagtctttcatccgctgtaccacagtcttatacgcatctggatgataccaatgctccatccccacttcttgatagagcgattccatgccgagtcgccgggtgcgcttgccctcgctgccatcgcccatgaaataatcgtcaatgcatacacgctgaaccagaggtctcaagatggctgcaaactgttcactgctgggtaatacgggagcaatcgcaacctgcgtgggtattccagcatcccgcaactgttccagtgcacgtaatcggcctgcaatcgagggagcagaaggactgaaatgcttgcgcatatcgtccagatccgtctccaccgtcatgctgacccgaacccggtcacttaactgctgtagcagatctatatcccgggtaacgagtggactgcgggtttggactaatacaaaatcgggcggatgctgtaccatcgtttcaagcaatgaacgcgtgatacactccttgtattcggcgggttgatacgggtcggtactggatgacatgaacagagtgactttccctttggtcagggcacgctgcaactctttggcgaacactcgagaagcctcctgtttcacatccacccagctcccccaatcctctttgcgaaataaggaaacaggcatctgtctgacataacaataggaacaaccgaaggcgcagcctgtgtaaggattcagcgtatgtgtatagcctttaaggaaccctgtccccttgttgagtaacgttttgggtactttgtaagtaagatttgtcttcataagttctcatgcctttcgcggtagtgtgcaggtgtgagacctgtgtgtttgcgaaatacagtaatgaaataagctgagttaggtataccgacatggcgaccaatatcggtgacggtaagtccggtatgttcaagtaacttccgggcttcggtaattcgtttatcctgaatatattgaaccggtgtgcggcctgtaatccgcttgaacacacgatgcagatgataaggactgccatgacttacagtggcaaggacatccaaggttagaggttcggcgtaatgatgttcgatgtaatccgtgatcccgtatatccactcctgatcaggtacccgctcgcctgtaggtttacaacgtttgcagggtctgaactttcgtgccaatgcttcttcaacatgttgaaatatcagcacattttcagctttgggtgctctggacttacaggaaggtcggcaaaagatacccgttgtctgcacaccgtaaaagaatgttccatcataagaattatcgttgtggatgatggcatgccaatatttttcatctataggttcgggcagtatgcgatcttgatctggactttccacggtgatcacctcatctctaattatacccttgattcgaagggattgacgtagttttaacttaataagcaagatatcaatatttggggatatggctccttccttcaatctgaacgaaatatgagctacaatatacaagatggtatacatgtttagaactcaaatgaaatttatagatgaaagaggtaggtaggcatggttcgttttggcgtagtgggtaccaactggattacagaaaggcttcttgaagccgcagcacaggttgaagggttcaaattaaccgccgtgtattcaagaactgaagataaggctaatgcattcgcagataaatatgatgttgaacaccgattcaccgatctggaagagttggcggcaagtgatgtgattgatgcagtctacatcgcaacaccgaatacggttcatgcggagcaggctgagctttttctgagaaacggtaaacatgtattgtgcgagaaacctctggctgcaaatagcgccgaagttcggagtatgatcgatactgcacgagaacacgaggttctgctcatggaagcgatgaaatcgactcttgttccccagttcaaaatggtgcagaagagcctgcataaaatcggtcctgtccgcaaatacgtagcaggatactctcagtattcttcacgttacgacaagtacaaagaggggattgtcctgaacgcgttcaagcctgaactcgctaatggggcgttaatggatctcggtgtgtattgtctctatccattgattacgttgttcggtgaacctaaccgggttcaatcccaagcgatgatgctggaatctggcgtggatggacaaggtagtgtgctgctggactatgatgggatggatgcggtcgttacatactccaaaatctccaactctcatctaccaagcgaaatcatgggtgagctgggcagcatcatcattgacaagattggctcaccggaacatgcagagatacgttacaatgacggtacggtggagcagctcacagtcgaacaaaaccatccggcgatgtattatgaagtggaggagttcgtgaatctggttgagcagggccaaaaggagtctgatatgaacacgtatgaacgctcttatgtgacgatgcaggttatggatcagattcggaagcagattgggcttgtgttccctaacgattgattcaagcgcaggaaaggaagctgagacgagatgagcagagatgagcagagcaacagtaaagaagtgcagaagaacagtagagaagatcagcagtccaatgattctggaggtttggaactgaaacagatcgttttcataggaagaaccttcgaagaatatatgaagatgttcaacctgacggtggacgagattaatggcaagtctattctggattgtccaggtggagcatgttcgttcagtagccaggcgcgcaagttgggtgctgatcccgtggccgtggatattgcctacgaatacgagatcgacgagcttgaagtaaagggatttcaggacattgagcatacgatgaaacagatggaacccgtgcaagggatatatgtgtgggatcaatttggatcaatccaggggttaaaggaagaacgaactcgtgccatcacagattgcatcgcagatatgagaatgtttcctgaccgttatgtggcgtctgtgctcccggatctaccctttgcagatgaacaattcgatctgacgttatccgcccatttcctgtttacttatgcggatcgattggatgttgattttcatgttgcaaccataatggagctgctgcgtgtgagcaaacgagaggttcgtatttttccaactgtggatctgtctggtgaacgttacaagcacatggatgctttaaaattaatactcgaagagcgtgggtgcacggtatccgaagaaccaacttcatatgagtttcaacggaatgctcataccatgcttcaaattgttaaacataatcgaacaagataggaggttttttggatgaataaagttcttatacttgggggtacacgttttttcggtaaacgtctggtggatcacttgctgtgggaaggaaagtctcagatcacagtcgcaactcgtggtaaaacggatgttgacttcggacccgaagtaaaccgaatcaagatggatcgtgaagacccggaatctctggcagaggttgcacagacagacatgtgggatgttgtgtacgataatatctgttattccccagatgcggcgaaagcggcatgtgaagcttttgcaggacgcaccaaaagatacgttctgacatccacactctcggtgtacggtgatcccagacctggatttaaggaaacggattttgacccgtatacatatccattgcagtatggaagtgcagaggatttttcgtatggagaaggcaaacggcttgcggaggctgtatttttccaggaagcggatttcccggttgtggcgatgcgcattcccattgtactcgggattgatgattatacgagaagacttcattttcatattgaacatgtgcaaaaaggaaaaccgatcggcatgccaaatccggatgcggagattggatttatcaattccaccgaagcggcaagatttctcgcttggcttggacattcgtccattaccggtccggtgaatgcaacttccaagggtgcgattacgctgtcagccatgatacatctgatcgagacggtcacgggcatgcagtcccagatcctcacggaaacggtgaaagaggacatgtcacccttcggaattgagcaatcatggacgatggagacgaccaaagctgaacaagcgggatatacgttcgaacctctgatggactggttcccgggactcgttcgtgaggtcgctcttgcattacagtcggagcggtagaaatatcggttcggatggaaccaaaatgaattcgacgagccttagtgaaacagacgaaccaaacggctcgaatgacggattatttcagcgaatgaacatccaacagggtgcaaccagagtgtaatctccggtgcaccctgtttatgttgtacatttttacgaatttgaacgggacctaatctagataagtgggactaatcatttacacgatattatttagtcaattcttgtgcttaactctatttttgctcacgtggagcagtagctgaagcccgtatgcgcagttctgacggtagaatgagggtttgggcttcggaaggggccttgccctcaatccggtcaatcagcatctgtactccctgaaacccaaagtcatatgctggctgtgcagctacagtcagaaaaggatcaaaagcagaagccagatccagatcgtcgaagcacacaacagagatgtcttctggtacacgcagtcctcgttcgcgcaaaagccgaatgaccccaatcgccagcatgttgttggcggcaaaaatggcggttggttgatccggttgagagagtaggcgatccagtccttcttcatcgctgaaatcccggtaccccgttcgaagcacaagctcgggatcgatatcagctccgacctcacgcaaacccgctacataaccttcctcccgcagtctggcggtagaaacctccgaagaaccattgaccagtgcaatgcggcggtgacccaattgcaccagatatcggatcagctcaatcgcgccttcccggctatctccggcaatgatatctgacgtaatgcccggtaccgtccgatccagaaagacaaacggaatgtgacgttcctgcagctgtttcagatgagtgagtgaacgatctcccgccggagcataaagtacaccatccacacgagtagacagaatcgcatctacgtaatccttttccttattataatcctcgtcactattgccgaataaaagacggtacccacgaagatgggccgcatcttcagcaccacgggccagtgttgtataaaaagggttggtaatatccgtaataagcagggagagcatctgggttcgttgaagcacaaggctgcgcgcattggagttcgggatgtaacccagttcgtcgatcacctgttgcacacgttcacgtgtcgcggaacttatgcggcctgtatgattaatgaccttggagaccgtcatggcggagacgttggcttttttggcaatatcgtaaatggtaatcattagaatctaacctttccgcaacatagtcttaccattctataggataatgtcaattgacagcaagataggctcgtgctatgttagggttaccgataaccctaaagggttctgaacgtctttactacataaaccatttcgttgaattcgctcatgcttgttccattttccgaatagaggaactacattcatagctaattaatgaagtggtttattgttatttttaaaaatatgtaaacgcattcaacactcaagtagtgctcttgataatctgtgtatgtaactctttcgtgccacccgggtatcggttgtatttccgtcattatcttattccaatcactgcacatggatcagacagaaggtttctcaattcaacccaaattctatgaaacgaattgaaggaggacattccagtatgacacatcaggattatcgttataaacaggctttccccaagattggtattcgtcccacgattgatggaagacgcaaaggcgttagggagtcactggaagaacaaacgatgcggatggcgacatctgttgccgagttgcttgcagcagaactacgttatcctgacgggtccgcagtggagtgtgttgtggctgagacctgtattggcggggtggccgaggcggccgcagcatcagaattgttcagccgttcgaacgttggcgtaacgatcaccgtgacaccatgctggtgttatggtacggaaacgatggatatgtcaccatccattcctacagccatctggggttttaacgggactgaacgtccgggtgcagtatatctggcagcggtactctctgcccatgcacagaaggggattccggcctttgggatctatggagaagatgtgcaggacggcggagatacaacgattcccgatgacgtgcgtgagaaattgctccggttcagccgtgcaggtcttgcagccgcgaccttgaaagggcaagcctatctgtctattggatcagtatccatggggattgcaggttcgattgtgaacgattcatttttccaagagtatctgggcatgaggaacgaatatgtagatatgagcgaactcactcgtcgtattgaagaagaaatctatgatcctgaggagtataagctcggactggcttgggtgaaggagaattgtaacgaaggtccggacaacaacgctgcccatctgcaaacggatcgcaaacgcaaagagtacgaatgggaaaccgttgtgaaaatgacccaaatcgtgcgtgacttgatggcgggcaatccaagattggcagagcttgggtttacagaggaatcgatgggtcaccacgcgattgtatccggcttccagggacaacggcagtggacggatcattcacctaacggagattttctggagtcgatattaaactcttcctttgactggaatggcaaacgtgcgccttatctggttgcaacggagaatgacagcctgaacggggtatcgatgttattcggttcgctgctgacacatacggcacagatctttgctgatgtgcgtacgtattggagtccggattcagtacagcgtgtgacgggacaccagttggaaggaaacgcgaaggatggcattctgcatctgatcaactctggttcggcagccttggatggcactgggcaacagtccagagagggtaagcctgtactcaagccattctgggaaattacagatgaggaagttaaggactgcctaaaagcaacatcgtggagaccggcatcggtagaatacttccgcggaggcggctattcagcggatttcctgaccaaaggtggcatgcctgtaacgatgacacgtctgaatctggtcaaaggactgggaccagtgctgcaaatcgctcagggttacacggtcgatctgcctgaagatgtgcatgatacgctggatcagcggacagatccaacctggccatccacctggtttgcacctgttctaactggatcgggagcgtttacttccgtatacgaagtcatgaatcaatggggcgccaaccatggctccatctcgtatggacacatcggtgctgatctgattacgctcgcttccatgcttcgcattccggtaaatatgcataatgtacctgaaacggaaattttccgtccgcgtgcatggggattgttcggcacaagtgagccggagagcgcagactaccgtgcttgcagtgtgtttggcccgttgtatcgttaaaataaagttccattcctgtcaaacgccatgttccttgtgaaatgaggtaacatggcgttctcttgaaaactgtgttcagaactcgaatacggcttattgctagagttaaggaggcttgaaagaatgggcgatcaagcaacacatgtgcttgctgccgattacggcgccggtagtgggcgcgtagtccggggttcttttgatggaaacagactctcgttacaagaagtgcatcgattcaacaacgaacccgtgcagttgggggacggattgtattgggatttcttgcgactttttcatgaattaaaacaaggcattgtgaaagggacgcaaggcgtctctccatcggtccgttctatagcagtggatacgtggggagtggactatggactggtagatggtgcgggaagattatgttctaacccgcgtcattatcgggaagcacgcaacgcacagtggatggaagaagtactgcacatggtgaaagaagaagaactgtatgccatgtccggcgttttgcctcagcagatcaatacggtatttcagctgctaggaagtgtacgtgagcaggccgaaggtttgcgtccggatgtgcgcatgttatttatgccggatttatttcactattatctatccggtcagcaggcttgtgagtatacgattgcaagtactagcgggctgttgcatgcaggcgaggcgcgttggaatgaacatctgatcgggcgtctcggtataccggaaacattatttccaaaactcgttcaaccgggtaccgtgctgggcgatctaacaaatgagttgtgcgccgagttacggactggaccgatgcaggtagtctctgtgggctcacatgatacggcatctgccttggcagcgattcctgcgacggattcggatttttcttttatcagctgtggaacttggtctcttatgggggtggagcgtgatacacctgtattgggtaacagaagtcgtgcattgggattcaccaatgaagggaccgtgaacggcaaagtacgtaccctgaaaaatcgttcaggcctgtggctgctacaggaatgcaaacggcaatgggagcgggagaatcaactttttacacatgaagaactgattcagctggctaccttggcaacgccacatcaaagttatgtatcgccgggagatggcgtgtatttggcgccagggaatatggctgaacgaatacggcaacaatgcagtgccagcggacagacagtgcccgaaacgactggagcgattgtacgctgcattctggaaagtctggcactggaattcagacagacgctggatgaattgcagttgattacaggtacaagacctcgtgtcattcatatggttggtggtggtgtacacaatcgactattatgccagtttacagccaatgcagccggtgtcgcggtggtggcaggcccggcagaggcgacttcagcagggaattgcatgctgcaattccttgcgcatggagaagtgagcagcttggtcgaggtacgggaggtcatggctgcttccttttcccccgagacctatgagcctgaggatacagagctgtggcaggaagcttatgaaaactaccaaagtctgaatcaaatcaaaaggtaatgaacagattcaatgcaatgagcattgacgcaaaatgctaaaaagaaaagtatgaggagtggtaagcaacatgtctgaacagcaagtaagggaagagttgacgaagtatgcacgtagagcagttgcccaagggttggtggtaggacccggtgggaatctgagcgctcgctctgggggaacgatgttgttgtctccgagtggttatgcacttgaggatctggagcctgacgaatggatcgccattgatatcgagacaggagagactcgtgcgggatcaacacgtccatcttccgaagtattgatgcatctgtacagttatcgtgtgaatcctgatatccaagccattgtgcatacgcacccggcatatacgatcgcacttagtctcgttttcgatgaattgccacacttgttccctgatcagtcggcattggtgggcgatatcggattcgttccatatgttctgccgacgacgaagcttcttgccgatgcagtctcagcaaaggtagaagaacatacggcactcattctcgtcaatcacggattggttacgaccggtaaaaacctccgcgaagcctattaccgcacccaagtggtggaagaaagcgcgaaggtatatatgatcgccaaggcagcgggggaacccaaagtgttaactgctgaagaatataaggaaattcaatcccttgaaagtgaagcctaccgtgtgcagttattgcaacaactcaagtcctgatacctgatttgaatattaatgattacatttgtgatgttaaaagattgctacgttaagggcagattgcattctccagataaacgctggaataaaggatgtaaactgctcttttttaattttgaatttgaattgaaaaggcgcacagtatagctgagggaataattcgcactattttgatgagaattgttgaaattgtgatgtctgcaagttatactaacgttaatcatcagtgagtaacaactacgaagaagattaaaaaaacaattaagtatctaagaggggtgagatcagtgggtcctgagctaaacgaaatggagttggaatacgaactgctaaagcagcttcgagacgctaatgctcccatcggggccagtacgttggttcatactttgggcaaaacgtatggtctgagtcaggcaaccatcggaagaagacttatggagatggatgttgaaggttttacagttctggaaggtcgcaagggaagaactttgaccgaacagggtctggatcgaatgaagacgttggaaaaagatttgcagcaacaaagcgtgaattcacagttaattcagatgctgaaccattccggggaaaaggctctgctagatgttctcgttgccagaagggcacttgagcgggagatcgcttccttggcagcacaacgtgcctcgaaagaatacatagtactgttgcaagcatctattgccaaccagcatgaattgctctccaagaatattataccatacgaggaggaccgggagtttcacagattgctggcttatgctgcgcaaaaccaaattcttctgcatgcggttgaactggtatgggagacaagccgcgattttctggaaacagcgtatattcgccggagagtaggaagtgaattagttgtagatcatcagcagattctggatgctattgtagcgggctctccggagcaggctgaagcggcaatggtgaatcatatcaaccaaatgatcgatgatgtcaaacgttatttcgccatgcaaaaccaataacattccttagaaacagacccggtgataaaggagttgagcttgtggacacaatctaccgtttaggcatagatatcggaggtactttcacggatgcgctggtgatggaccatcagggcagggtgattgcggcgctgaagacgccatcgattgcagtagctccggaacaggcgatttttaacgcacttgatcagttgaaggcgagtggcgtgaatattcatgagattgatctgtttgtgcatggaacaacgcttggcgtcaacacgttgattgagcgaaatggcgcagttacaggtctgctggtcactaaaggattccgtgacattcttgaaatccgccggttgcgacttgaggatacaaccaatctgtatggtgacaagaccgatgctctggtaccgagacatcgcgttaaggaagtcgatgaacgggtcattgcgagtggaggcatactccagccactgaatgaggaacaactgttgcaatcggtggatgagctggtggaggatggcgttaccgctttggcgattagctttttacatgcttatgtgaatcctgctcatgagcagcttgcagaagatctgatcagggaacgttatccgcaactgttcatctgccgaagcagcgccatctggccacaacagcgtgagttcgaacgaacactcgcaacggccatgaacgcttatgtaggtgaacggatggggtcttacttcctgcgtctgcaagaagggattcaggtatacggcctcaaagccaacttgctgtcgaccatgtccaacggtggaattatgacggctaccagagcggctaatgagccggtacgtacgcttctgtccgggcctgcttccggtgtaatcgccgcgacccatattgctgaacgagcgggcattcatcaggtcatcacatttgacatgggtgggacaagcgttgatgtcgcccttattgacaaagaaccgagttattcttctgagaacaaggttggagattttcctgtcatcattcccgctgttgatgtaacggctataggagcaggtggtggttcaattgcctggctcgattccgtgggcgtactcaaggttgggccacgtagcgcgggagccaaccccggtccggcatgttatcagcgcgggggagaagagccgacaaccacagatgcctatctacagctcggtatcctgcatgctgaccatttccttggcggacaaatgcgtctgtatcccgaacttgcagagcgtactctgggcaatctgggagagaagcttggactgaatgccgaacagactgcgcaagccattctcgatgtggcaaccgccaatatgtatgcccagttttcccctctaatggcccgcaagggcgttgatcctcgagattttacgttgctcgcatatggtggagccggcccgatgcatgcttttctgatggcacgtgaggtaggtatcggcagagtgctgatcccgccatctccgggaacattgtgtgccatgggctgcacggttgccaatcttcgcaatgatttcgttcatacgttacacaaaagcacccagactctggagtctggtgaattaagctctctttttactgaattggaaaaccagggacgtagctgggtcgaagaggaaacccgtggtggtgtcaagctggacaatatttattgcctatacagtgcggatatgcgatatgagggacaggcctttgatatagaggtcacgctgacattggaagaaattgaagatcccaagaaggcagggattaaattccatacgtcttaccaaaacgtgtttggcattagtcagccagaggcagaggtcatgtttgtaagtctcagagcgaccattgttggtgttttgcctacccataacacggtagatccggcagatttgccattcgatgagagcacagcagaagaaaggatcataatctttgaccatgtacagcagacagccaaggtactgaaaaggagacagattccatcggtggatgctcccatccccgggcccattattgtggaggaatatgatacaacgatctttatcccgcctggatataaggtataccgggatgtccacgggaacgtgattggggaggtggaagcatgatcggcgacaaggtctttcttgagatttttaacaaccgaattcaagctgccgtggaagaaatggcaaatgttgttctgcgcacaggattcaccgcttttgtcaaagaaacgggcgattttggaacctacctcttatctccatccggggaaacgtttgggtcaccgctggagacgggttacaacctgtccttgggcatccctgctgctgcgaccattaacagtgtagaagactggaaagaaggggatctcgtcatatgtaatgatccttattccactaaaggcatggtcacacacctcccagacattcatctcatcaagccttattttcacgaagggagaatcatcgcttacggcatgtgctttgttcattcatccgatgtgggcggcaaggtaccggggagcgtatctcccagcgcctacgatattcatatggaaggcattcgaattgcaccagtcaaactgtatgaagctggtgttctgaacgagcagatcctgcgcatgtttctggacaacagccgaattcccgagcaaaatctcggtgatctcaaagcgcttatggctgcattgaatcggggagagcagcggctggaggaactcattgcacgttatggcgtggaaaaaattcagcagggcatcgaacaattgctggaatatgccgagctgaaggcacgtgttatcgtgcaggatatcccggacggttcctatgacttctgggactatctggagaaaggaccagggggatatcctatccggttgcgctgcaagatgacgattgcaggcagtgacattcatctggactttagcggcaccgatcctcaggtcagggcttcattcaacattcctacccataaccaacagggccattacatgctggtgcccgcactcattcgttatttccgtacgcttgatccgaccattccttggaattcgggcatgattcgtatggtgcgaaattacgcgccgcctgcttccgtacttaacccggagccgatggcagcagttggggcacgtgctgcgacctttatccggctgatggacgttatcacgggagcactggggaaagctcagggcagtatggttcccgcggcaggagctggacaagcttgcatcgtcatgatggcgatgacagatgcatccgatggcaagaaaaaggtgggcgtaattcagccgatctgcggaggttcgggagctaggccgatgaaagacggcattgatggcatggattttgcggtcggtcatcttcggaatattcctgcggaaacggtagaatccgagatgcctgtgttgatcgaacattatggtcttcgtgccgactcggcaggtgcaggaaccttccgcggaggaagcgggattgacctgtgcgtcagaattctaacaccggatacggtgatgacggccagaaacatggagcgtatggagttccagccctggggcaggctcggtggtggcgtaggttcacatggagaagcgattcttaatgctggacgtgcaagtgagcatcatctgggaagaattgatgagctgctgcttcaacctggagaaacggttacgttcctgtcgcaaggcggaggcggatatggtgatccacttgaacgtgaaccacgcctagttctggaggatgtaagaagtgggctggtatccccggagaaagctcttgagttatatggtgttgtgattgacggcctggagctgaacgagagcgataccgaacaaatgcgagccaagcgaccacggcagcaggaggaattcgcctttggcaaggcgcgggagcaatttgaagacatatggagcgatgagatgcaggtaacactgaatcaggccttgctgaatgctccgcttgcactaagagactacctgaagcgtcagaccatgggtgttgtagaggagaagtataaggattcactatctatagatccgcgggagatatccgacattatggaaggtttacgccagcaaatagggttgcattgatcaagtgtatggagactgtctagttctgtcttatcggtaaaaccaactacatggatgggggaatttgcatgttcaaatccaacaaaaaacgctttctcagcctcgcctctctgacactggccggtacattggtgctttccgcctgcggtggagcaggcagctcaagtaatactgccggagagagcgactcttcaggagcaagcggagacaaagttaagctgacgatgtttatctgggctggctccaatcaggatgtcgttccgaaagaagtggttgccgagtatgtgaaagaacatcccaacgttgaagtcacctttgaggaatcctccaattcggtaatgtaccccaagatggtcgcaggcaagcaggctgatgccaacaatccgattgttaacttcggttacttcaatgcagatgcgacggcaaaaggcttgaatgatgacatgtgggagccactggataccagcatcgtgaccaatattaaggatattcccgagtccttccacaagccagacaataaaggtgtggtctggggcgtttcgagcttcgccctggtatataacaaagatctggtgaaaacgccacctaccagctggaacgatctatgggataacgaggagttcaaaggaaaaactgcgctctgggactacatgttctattcctatatctccccacttattgctaccaaaggtcaagagattggcgcatcctatgaaaatcccgagccagccttccagttctgggcagatcgcagtgaccagattggcacattggtttcatccaatgatcagctgaaggcactgctggagtcaggtgatgcgctcattgccccattcagtgcacaggttgcacagacatggattgatggtggttctccacttgccgtagcgtatccgagtgaaggtgccatctccttcccgtacacacttcaggtagtgaagggctcaacacctgagcaagcacgtgttgcaaatgaaattattaacgagttgttgagcgccgaggcgctgtcacaatatgcagaagcaacgggtacgccggtaaccagtacgacagctgcagttccggacaagtacaaggatgatccttcattctccgtggaaacgcaaagtaatggtattaatccagactgggatgtgcttgcacagaacagctcttcctggaaagaactatgggaccgtctcgtgaaaacaaaacttcaataaaaggattgttgccaggcacacaataattccgggttctgctctgaacctggaatggatgggagggaatcagagatgagtagcggacaagagaccatatccattgaaacaagggaagtcacgaagacttatggtaagcgagccgccgttgatcaagtaacactccaagtgaaaaagggggaattcgtttccttgcttggtccgagtggctgtggcaaaacaacactgcttcgcatgcttggcggacttgagcagccggatcagggcaccattatgctgggaggtcgggatgttactggcatcccggcttatggacgcaatagcaatatgatttttcagcagcttgcgctgttccctcatatggatgtattcaacaacattgcctatggcctaaaggtgaagaagttaccaaaagtcgatatccaacggcaggtaggtgaaatgcttgatctggtccagctcggagactatggcaggcgtgctgtatccgagctgtccgggggtcaggcacaacgcgtcgccattgctcgcgcactgatcaacagacccgaagtgctactgcttgatgaacctctctctgcattggacatgcagctgcgtctcgatatgcagcgtgaactgaaacgcatccagcgtgaattcggcggaacgtttatctttgtaacgcatgatcagagcgaagccatgaatatgtctgaccgaattggcgttatgcgcgatggaaggctgctgcaatacgcaacccctgatgaaatctatgaaagaccgaccgatagtttcgtggccaagtttattggagataccaatctctttgagacggaattactgggacatgatgtgaatggaattcgggtggaatgcttcggcaagccattgctggtgaaagtcagtgatggcaatgctgtaccgaaagcgggagcacgacattccttatcaatccgcaatgagtatattcgacttggagaagatgcaactcattgcctgaacaagctggatggacacgtgattgaagcggtgtatggcggagcaaatattcgatacagtgtgcagattgctgaaggttttctggttcaggccagtgtgctgcatcagcggggagcttcacgttatagtccaggtgagccaatacaaattggctttgatccagaggacgcgctcttgttatccgaacccattgatgaccgtgtacagggggcaagaatatgaaccggatcgcggaacggatcgtgaatctgtattcctttggaaaccgcacatgggtaacccggttgttgcttctgttgcctgcgcttgctctgatgggcatcgtgtatctgggcgggttgctgatctttagcagatatagctttgatatgtatgagaatggaaagcttattcggggctgggattggggggcctatcgtgcgtttctgtctgatccttattattggaagctgattggcacaacgtttcgaattgccttcaaggttacgctatggagtcttctgcttgcctatccactggcgtattgcatagcgggtctaaagaagcctggcatgaaacaattgttgctgctgctcacgttccttcccctactggtgagtgcggttgtgcgttcttacggatggcagctgttactgtccaaacagggcttcatgaactggctgttcatccgtctggggctaaccgaggaaggattcagcatgatatacaacgagacaggtgttgttgtggcccttgtccatatttttctgccatttatggtctttccgatcctgaatgtactgtcccaaagtgacgcttccttaaaggcagctgctcaggatctgggggcgggcagctggagaacattcctgaccattaccctgcctttatcggcaagaggtattgcaagcggggtgcagattgtgttcacgctatgcctcaccgccttcaccacacctcaactgatcggtgggggaagagtcatgacacttccggtgtttatatatcagcgaaccttggacaccaactggccgatggctgcggttgccagcctgtttttacttgtgtcttccattgttgtttcgttgcttgtgaataaaggagcagaaacgttgatgttccgtcgttcccgtaagggaggtcaggcgtatggttaagtcgaacaggggcaccaagctgttactctacatctttgtgggtgccgtagcgatttatttgttgctgccactgctgatgattatgttgacatctgtaggctcaggttcagccagcaaatttcccccggaaggcctcaccttgaaatggtatgccaatctgagtgagcagacccagtttctcgatgcattcaagaacagccttattgcttctacaggggcggttctgctggctttgattacaggtacgcttgctgcattagcaatcgtgcaataccctttcccgggttcgggtatcttaagggcattttttgtatctccgatggttatgccaaaaattacgctgggtatcgcatacctgattttattctcgaaaatgcatattgctggtggactgtttgcacttattttgggtgaagcggtcattgtgcttccatttgtgctcactattgtgggcagtgcgttagccaatctgcacccggctcatcgggaagctgccgcggaccttggcgcagggccgatgcgcatttttttcacaattacgttgccacagctccgactatccctgcttctgtcagggtcaatcgcttttgtcttcactttcgatcaggtagaggctgctctgttgctgctccgtcaggacagctacacgttgccaatacaactattcctgtatatggagaaatggcaggacccaacgatagccgtggtgtctgttgtattgatcgcgtttgcgctggctctgtttatgacgattaaactagtactgcgctctgtaccaggacttgaaagtttgtttggtcgcaggaaaacaaaaggaggtctggatcaaaatgaataattcactgcatctatcccatagctcaggtctgaaccgggacctggcggaagaaatgatgaaaactcaagggctaagcgccctgatcgcaacaactccagagaacattcactatgtcatcgggtcccagctacgtgcaagcaactggaccatgcagatttatgcggttttacctgccgacagatctgcaaagccttgtatcgtcattccgacgaatcggttaggcgttgtagcccagttcggtataacgggggtagatatatttgcctacagtgatttcttcgtggaaggttcaattgaaggcaaaccttccactgacgacattgatctcttttattctctcctgcaaacgacggtcattcatccaggtcctgttgaagcactcaaggcagcattaaaacagcttgagatcgaagatcagccgattggaatcgatgagatgcggatcgctcccgatattctggctagaatcaaggaggaggttcctgacagaccggtaattcccgcatataagttgttccgagaaatccgtctggtcaagacacctttcgaaatcgagcaacttcgtcaggctgcccaattaaatgaacggattgagcaggaactaattgacctgattgcagcaggtgttcatgagaagcaacttgcggatcattatcgtctggctgtgatgagagcaggtggaactccggcaatgacagcggtaggggcagggccacgcagcgcattaccactcatcgaaaattattttcatacgattgagaccggagatcaggtccgtttcgatctttgcctgcagctggaaggatactggggagatacgggccgcacggttgttgcaggggagcctaccgcttggatgaaaaaacattttgctgcggtcaaaagtggatgggagacggcacttgaaacgctgcgccctggcgtcaaggcgtcggaagtattccatgcggcagtatctcgcgtacagcgtgaggggattccgcattaccgacgtcagcatgtcggacatgccatcgggttggaactgtacgacgaaataaccctctccccgggtgaccagcggatactggagcccggtatggtgttatgtgttgaggtaccctattacgagctaggtgctggtggattccaaatcgaagatacaattgttgtaacgccagatggttatgattttttaacccatatggagcggaaattgttcactaaataacgatagatggaaggcttcgctgaccggcgatcagaccacagtcgatccaagaagctttcttactgggaaagttggaacatccatgattcagcagggaactaagacgtttcgtaacattagccttgcactgttcgccggaggttttgtcacttttgctttgctctacagcctccagcccctgatgcctgagattagcaacgcattctccattacgccggcacacgccagtcttacgttatccgttacaacgatcgccatggcactgacgatgctgttcatcgggtccatgtctgattctgtgggccgacgctttataatgacagctgcactggtgatatcttcagttattgctttgctcagcgcattcagcccgggatatacggagcttcttctacttcgtattctccagggtgtggcactcgcggggttgccagcgatagctatgacatatttgtcagaagaaattgaacctagaagtcttggttatgctatgggcctatatataagtggcaattcgataggaggcatggccggccgtttcatcagcggtgtggtgacagattggttcagttggcgcgctgctgtgggtttcattggtattcttggactgtgtgcagccgttattttttggcttgtcatcccgccatcccgtcattttgtcaaagctgcacccggattcaaaaatccaatacctcttttgtggtcacaatgtcgcaatccaaggctgttatgcctgtatggactcggttttctcctgatggggggattcgtgaccctgttcaactatatcggttttgaattaacgggtgaaccctatcatcttagccagtctatcgttggaagtctttttgtggtatatctgatgggcacggtaagcagcacctggatgggcaggctggcagatcggtacggcaggtcacatgtgcttggaatcgcgctgggaattattctggctggtgcagtctgtaccgttcatccagcgctttgggtcaaaattatcggactcgccctgtttgcctttggtttctttggcggtcattccatcgcaagcagctgggttggactcgtggccaatcagcacaaatcccaggccaatgcgttgtatttatttttctactatcttggttcaagcgtaagtggaacaggaggtggactgctttacagtcatcttggatggataggcattgtggggatgatcggtgtgtacgttttgatcggttttgtcttgtgtaatttgcttgttcacaggttgaagggacaggctacataaatcaactttttccgacagctattgcatatcctgaaataccgagtataatacttggtaaatagacgaaaaggggatgcaataaacgatgaaaacacatgctgaattgaactcacttcttgttgacgattatctggatctcctgaacattgcgaaacagctaggtgatgacgaatggaaagatgctattctgcaagcattgaaggaagaagtcgatgcgaatcatcatctggattccaaagaggtaagacaggatttatggattcaattcgaaggcattaatgaacaaatgcatgatctgttaatgcaattgaagcatgccgacagtcctgaggagaaagagcagattattgaaatgatctggggattgaaagtagaccgtcatgcgatcacacgtaaacttgaaaccatgagccgtgccagcgctggacatcaataagctctaggttgattatacattgaaaacccgcgtgttccctgggattatctcctgggtcacacgcgggttttgtttatgttttaattgtttactacactttaagtgagtgttcaaaagcgtactttttgaactacttctattaaaactgttttgcgaaagtagttgcctgctcgatagcttgttgcttgatctcatctgcacgatctttatattgattgtgcccctcaacaaaaatgccatcaagcttcggcacaccgaggaatgacatgataatgcttaagtaacgatgaccggattccatctgagccgctgggccttcggaataaatgccaccgcgcgcctgaatatgcagtgcttttttgtcggacaacagtccaacaggaccttgttcggtataacgaaatgttttgccagctacgcagatcgagtcgacataagccttcagaataggaggaaacgagaagttccacatcggggttacaaaaacatatttatctgctgaggcaaattgatccgacagttcattcaaacgacttactttggtctgctcttcggcagtcagatcactgcccgattgcagtttgccccaaccactgaagacatccgcatcgatatgggggatatccgagcgatacagatcgaggtgaacaacctcatcagaagggtgactttcacgatacgcatcaataaatgctttgcccgtagccatgctgaaggaggtttcatgatcgtgaggatgggcagtaatatacaataaggtagacatgtaattcttcctctctgtgcgattcatgggggaaccgatgtttgttagtaataaagcgaccgcagtagtatgcatcgtttcccccgttttatacgtcagaaaagatatgtatggactgatcatgatactgaattagatgctatatagtgaccggatactcaatccatgtataatatacaggacgagtatttattttccaaagacaataggatgagtgagatgagcgcacatgggaatggacctggagaagcaacgattaagcattgaagcagcgaaattgtattatcagtccgattatagccagcaggatattgccgcaaggttgggcgtgtcgcgtccaaccgtatcaaggttacttcagtacgccaaagatcgtggatatgtccggattgaaattatggacccgctggaggatatcgacatcattgccggagaacttaagtcaaaatatgatctggatacggcacttgtgtgttttaccccgttgaagagtgatgaggaaatacagaagcatatcagtaaacgagcagcggattatcttcaagagacggttcaggatgcagatattatcggggtgacttggggaacaaccatgcatgctgtagcacgccaacttcgtcccaagcaggtcaaaggtgttgaagtcgtgcaattgaaggggggcgtaagtcactcccatgtcaatacgtatgccgctgagattgttcatttgttcgctgaggcattccatacggtaccaaggtatctgccgctgcctgttattttcgacaacattgaagtaaaaaacatggtagaagcggatcgacatatcggcagaatcgtggaacttggcagacaggccaacattgctttgtttaccgtgggtactgtgaaagaagatgcattattgttcaggctcggttacttcaatgaagaagagcaacaattgctgatgaactccggtgcaggtgacatttgttcacgctttttcgacgcggaaggtcagttgatcagtgaagagattaacagcagaaccgttggaattgatctagccgagttgagaaataaggaaaaatcaatccttgtcgctgggggacaacgcaaaattgaagccatacacgccgcgctcaaaggtcattacgcgaatattctggttacggaccagtacacagcacaggcattactgcgattctgatttcaaatgaatatggatgacaacatctgccacgcaaaaagggcggatgtttttcttttttaggcagaaaatataacgaagaagaactgtaagtgtaattgtgaacaaaagttcaagttgatttttacatatgttcatgttagtgtaagtgtatagaaaataactagttcagataagggagagattcaattgactacaccacaattagcgaaaatgatcgaccatacgttgcttcgtgcggacgcaacgcaaagtgaaatggccaagttaaccgaagaagcgaagcaataccagtttgcttccgtatgtgttaatccaggctgggttgcttatgctgctgagcagttgcagggtactggcgtagatatctgcaccgttattggtttccctctgggagcatctacatcggagacaaaagctttcgaaacgaaagatgcgattgctaaaggtgcaactgaagtcgatacggtcatcaacatcagtgctttgaaagatggcaaagatgattacgttgaacaagatattcgtgttgtcgttgaagcggctgcgggtaaagctttggtgaaagttattattgaagcttgtctgttgacggatgaagagaaagtacgtgcttgtcaggcagctgtgcgagctggagctgattttgttaaaacttctacaggtttctccacaggtggagcaacgccagaagatatcgctttgatgcgtcgtactgtaggtcctgatgttggcgttaaagcttccggtggcgtacgtagcctggaagatatgcaaaaaatgatcgaagcgggtgcgactcgtattggtgcaagctctggcgtgaagatcatgcagggtggtcagtctacatcttcttattaattcgttggaatctgactcgttagataacatctaggctttgcctacgggagtggacttgttcttcatgttaaacattaatatggagaacaagattcaagcctgaaaagcctttttattttttagcatgaaaattgatataaaacgaatttgttgtaagcgctttacttattttctgaaaggtttatttcattacacgcatgaaaaacctttgagctgattcacatccggcttaactaccttcaaaggagagttcaaatgaaatttctaattgccattatcggcttactcgttgtttttggactggcttatatcgcaagcaacggcaaaaagcagattcgttaccggccgctggctatcatgattgttttgcaagttatacttgcctatgctctgttgaatacaggagtgggtacttttttaattggcggtttcgcgaccgtatttaaaaatttactcgactatgcgaatgaaggtatcgcatttgtatttgggggtttgactaccgtaggtgccgaaagcgggggggcaccgttcttcctcagcgtattgatgccgattgttgtcatctccgcccttatcggtatattgcagtatatccgaatcttgccttttgttataaaatatattggtctggtattaagcaaaatcaacggaatgggcagactggaatcatataacgcggttgcttcggctgtattggggcaatctgaagtgttcatttctgtgaaaaaacaaattgggttgttgccaaaacatcggctgtacaccttgtgtgcttcggcgatgtccacggtatcgatgtcgattgttggtgcttatatgaccatgatcgagccgaaatatgtggttacagctcttgtactgaacctgtttggcggttttatcattgcttcgattgtgaatccttatgaggttacagaggaagaagatatattggaagtacaggaagaggagaaacagtccttcttcgaaatgctcggcgaatacatcctggatggattcaaagttgctatcatcgtagctgcgatgttaatcggttttgttgccttgattgcacttgttaacggaattttcagcgcggtgcttggcatttcgttccaggagctacttggttatgtgtttgcaccatttgccttcatcatgggtgttccatggaaagaagcgattcaggcaggaagtattatggcaaccaaaatggtatccaacgaattcgtagctatgcttaatttgaaggagactgcaatgtctgccagaacaacgggtatcgtatctgtcttcctcgtgtcgttcgccaacttctcctccatcggtatcattgctggtgcggtgaaggggctccatgagaagcaaggtaatgtggtcgcccgcttcggtctgaaactgctttacggtgcttcgcttgtcagcgtgctgtcagcgatcattactggactgttcttgtaaaccggattattggaaggagtgcttaggttatgtcaacattcaaaagagtacatctgatcgttatggattctgtagggatcggcgaagcgccggatgcagcagaatttgatgattttgatgtagatacctttggtcacattgcacgtgaacgcggaggtctgaaaatgcctcacatggccagtctcggactgtccaacatcaaagaaatcgagggtgtccctgtagcggatgcacctaaagcgtattacaccaagatgcaggaagcatccagaggcaaagacacaatgacaggtcactgggagctgatgggtctttacattgatacacctttccgtgtgttcgagaatggttttcccgatgagttgattcaacgcattgaagagaaaacgggccgcaaggtgatcggtaacaaaccggccagcggcacggaaattctggatgagctgggtgcagagcatgttgaaactggtgcgctcatcgtatatacatccgcggattcggttctgcaaattgcagcacatgaggacgttgttccactgaaagaactgtatgagatctgtgagttctgccgtgaaattacacttgaagatccgtacatgctcggccgcattattgcacgtccatttgtaggagaagcgggtaactggaaacgtactgcgaatcgtcatgactatgcgcttaaaccttttggtcgtactgttatgaatgaactgcaagatggcggatttgatgtgattgctttgggtaaaatcgcagatatctatgatggcgaaggtgtaaccaaggctgttcgtaccgtctctaacatggatggcatggacaagctgtctgaaacaatggatgaagagttcactggactcagcttcctgaacctggttgattttgatgccctgtacggtcaccgtcgtgatccgcaaggttatgctcaggcacttgaagactatgatgcacggctgccagagatttttgccaaaatgaccaatgatgatctgctgctgatcacagctgaccatggtaacgatccaacataccgcggtacagaccatacacgtgaatatgtaccactgcttgcctactctccgcgcttcagcgagggcaaaaagcttgacctgcgcagcacatttgctgaccttggcgcaaccgtagccgagaactttggagtgaaaatgccggaatacggcaccagcttcctgaaggatttgaaataagtttttcaaaaactggataggggaggtcggagtagcttggctgctccggtcctgccatcataatagactaattgtataactggaggagattcattcatgagtacacatattggagcaaaacccggggatatcgcagaaacgattttattgccaggagaccctttgcgcgcgaaatatatcgcagatacgtacctcgaagacgttgtatgttacaacgaagttcgtggaatgctcggttacacaggtacatatcaaggacaccggatttcggtgcaaggttcagggatgggaattccgtcctttgcaatctatgctaacgaattgatcagcgaatatggcgtaaaaaacctgattcgtgtaggaacttgtggcggtatgcaggagcatgtacgagtacgtgacgttatccttgcacaagcagcatgtacagattccagcatgaacaaacacgtattcggtggatatgacttctcaccaatcgctacgttctccctgctgaaagaagcctatgaccgtgcaacagctaaaggtatgaagattcacgttggtaacgtgttcagctctgattctttctaccgcgatgaccgttccgtaaccgagaagttgatgaaacatggcgtactcggcgtagagatggaaacaacagcattgtacactattgctgccaagtttggtgttaacgcactgaccatcctgacggtaagtgaccacttgctgacaggcgaagaaacatctgccgaagagcgtcaaaaaacgttcaacgacatgatggtagttgccctggacacagcaatcacactgtaattgttgcattttatattcataatcatttgattttaatcgaaacttttgtttaaagcacagagtgaaggacctggaatcgattctgaagaagcaaagcgttcgcctttgtctccgagttttctccattgcaaatggaatcaaaaaaacttggagacaacagcgatcggaggaaacgatccgaagccgggacgaatgttgcacagagtgttttgtaagacgacaacataatgttgttacattttatattcataatcatttgattttaatcgaaacttttgttttaagcacggagtgaaggacccggaatcgattctgaagaagcgaagcgttcgcctttgtctccgagttttctccattgcaaaatggatcgaaaaaacttggagacaacagcgatcaaaggaaacgatccggggccgtaacggactaacaacaaagtgttcaatacaatcaacacacacaaggagagatcatcatgagaatggtagacattattgctaagaaacgcgacggaaaagaactgacaacagctgagattgattttgttgttcaaggatacacacaaggagaaatccccgactatcaagtcagcgcttgggcgatggcagtattcttcaaagatatgacagacaaggaacgcgctgatctgacgatgtcgatggtgaattccggtgaaacgatcgacctgtccgctatcgaaggcatcaaagtagacaagcactccacaggaggagtgggcgatacaacaacattggtacttgctccgcttgttgctgcgctggatgttcctgttgccaaaatgtccggacgtggacttggtcacacgggtggtacaacagacaagctggaatccgttgctggtttccacgtagagcttgaaaaagaagagttcattcgcctcgtaaacgaacacaaggttgcagttattgggcaaagtggtaaccttacgcctgcagacaaaaagctctatgcactgcgtgacgtaacagctaccgttaactcgattccactgatcgccagctccataatgagcaagaaaattgcagcaggtgcagatgcaatcgtattggatgttaaaacaggtgctggtgcattcatgaaaacaacggaagatgctaaagaattggcacatgccatggtaagcatcggtaacaatgttggacgtaaaacgatggctgttatctccgatatgtcccaaccactgggtctggcgattggtaacgcacttgaagtgaaagaagccatcctcaccctgcaaggtaaaggtccaaaagatctggaagaactgtgtatggcacttggacgtcagatggtattccttgctggcaaggcagattccttggagcacgctgaggagaaattgaaagaagtgatccagaacggtaaagcactggagaaattcaaagatttcttggcaaaccaaggcggagacgcttcggttgtggatcatccagatcgtttgccacaagcacaatatctggttgaagtcccagcagataaagacggctatgttgccggaatcgtcgctgacgaaatcggaactgcagcaatgctgctcggcgcaggccgtgcaacaaaagagtccgagatcgatctcgctgttggtctgatgctgaacaaaaaagtgggtgacccagtcaaagctggtgagtccctcgtaacgatccatgccaatcgtgaagacgtagcagacgtcatcgcgaagatcaaagaaaacattacgattgcggatcatgctgatgctcctgtgttggttcatgatatcgtaacggaataatacaatcagagaagacgagatgtaatctcatgtctgacttaacatgaaagccccgaagctatgtaatccatagctttggggctttttgtcgttgaggtgcaagttgttactactactagcaactacgggctctttattttctcataagccatcaccgagtccgcattggtataaatataaggcatggatggctcggctacaggtgtcacctttgtggcgcgaatttcaatcgtatccttaccattcacctgtgctgagccgatgctgccatcaatttgcacccagctgtctgtagggaagctatccgcttcggggatgtgaatcatcacgccaaagggagccgcatccgctgggcaacacatgacgagaaatcgtcctagtgcaaaatgtgattcatgatccatgtttttgtcacggtagacaaacccggttaacgagatatctttgcctgcaaattgtcgctggaacatatcaatcgtgccgagggtttcagagaaaatctcaggatagactcgaatgacctgttctgcatacaacttctccgccagttcagcgaattcgcggctatactcgtcttggggaatgaattgtactttggtagccgaagcagcctgaacggtcgttggtttttgtgtgagatcttgtacattcaattgcgttgccggatcaggtaaaggctcttttcgacgaatctcgggaggggcataggtgagagacatgcctttctgactggccatggaactgccgagagcccgatcaggtaacagaaaccccagcaacaaggggatagcaatcagaccatataccattaagctacgaaggaaccccgagggtggtggatgttcacagtcgcaatgaacctcgtttctgccgaacagtccgtgccatgccatgataacggcaataaacaataagggaacaggacagcataatagcagtttttgcatggtaggagccaaataataatgaagcgaatcacttgaattcaactgaataatgtacactgccaccccgccgatccagcctgcacggatcaggttatgccattggatgacgtgtgaccttggaacaggaggcttggtcatcgtatagatagtgtggttcatatatcatcacctcatttctattcatagtcagaatgcaagttcatgggattaaccattcaggtcatgaagtattgggctcaacctttataccagcaggttaatcaaccacgagccggcgaagacgagtgtgataatcgctagacttaaacctataacaaaccgagtacggaaggttgagagcaacatgagcgtgcttttgaaatccagcattggaccaagaacaaggaaggataccagcggccccagtgcaaacgtatgtgagaacgcagaagccacaaaagcatcagaagtggagcagagagacagtacataagcaaatcccatcatgaacacataggaggcaacaggaccattaccaagagagatcagatcgctgcggctaatgaatgtttggatgcaggctgtaatcagggcaccgatcaccagatatttgctcatatcgacaaattcgtctccggcgtgaatgaagaagctgcgccagttttttacatggttatgatcatgtgcatttgcgtgcgcgtgaggttgcgccattttaaacccagggtgtgtcttaacctctgtcgctgcgacttttggcatccgaagaggatttcgacgaacaaacacatacacaagcatccctatggaagctgctacagcaaaggccagtcccatacgggcaatggtaatctcaggatgggagggaaaggcaagtaaggttgccgtaaatacgatgggattgactacgggaccactcaggatgaacgtcactgcaatataggctggcatgcctttgtgcatcaaccttctcactaccgggatcatgccgcattcacagatgggaaaaataataccgagtagccctgcgaccagcacgccgccgatcggattcttgggcgtgagtttgcggaccatttcttcggatacaaaccattgcatgagcgaggataatagcacacccatgagcagaaaaggtgcggcctcaaggaaaatacctatgaatacggttttcatattttgcaaagcttcactgttccatgcttccttcaagtccggagccattgtgatcaacacgggaacaagaaatgcacaagggaccaggaaggacaggagcttcagattggctgccattttcatgaaacagacctccacaactaggactttgctaaaatatatgcttgtacgtgaggcaacatacatcattcctatgttctaatcaacattattacgattaatcaagattttcatcatgttagatgttgacaatccaaagaaaactacggtatagttcggattgatcatcattaatagtaataattacgattaaagtttcaacttaaacagagtggaggaagcagaaatgtcagatcaacaggttcaacagcgggttccagtaaccgtacttagtggatatttgggtgcaggcaaaacgacacttctcaatcatgcaaaggcctgatgtggctggcgacaagaaacaatatggcaatctctttcagtcatgcaggtacatcgaagcagcttgcgccagcaggaatatgggtaggtgcgatgagtgaggaggaaagggaacttcattttggcgacacgctgccaagcataccggactgggatgatgagtggggtgaccgggtaaccaaattagtattcatcggcattgacatggaacgggcggagattgaacgtacattggatgagacccttcttacggaggaggagatgttgatgaactggcgtgaactgaaagatccttttccagcgtggagttgaagtgaaaagaaaagatcttcaagtgcaatagtgcccctgaagatcaatgattatattgcattaatgactttagctaaagtacaaatcgccaagataaaaatcaccgttgccacttttttgcggactaaacacaaaggtgaggtacactccataggaacccgtccatccttgtggataataaatggctttgtagctgtgtcttgttttggttttatcatccattgcaatcactttaaaatcagctgatttcacattaatcaactgatctgcatatttagtcagcgtttttttatcatttgctgcaatgatacctttgactgtagtcttaaatttatctttctgggattgcttacccagatcaaaaatgtcgatctcaggattttcaataactttagcatctatgtatttatcaaattcactagtgctacctgttttaagtgctttaccatacattttgatcagtgttaaagattctttctgcaatttgactatcatctgagcgtcagttccagtcatcttgattgagcctgaattagaagtacttgagttacttgaactacttggtttacttgaatcttcagaacctttggtacctgtactgctgttattactactagaactgcttgacttaccgctacctgaattagtgatatttacaactttgttactaacattcagagatacgttggctccgagtgcttctgctgtggtatttacaggcaagtatacatcaccgtcatataccagtgcattcagtttgtctccagcttcattcttgggtgtccaagacagaccgtttactttaaagctaatgttgctgtcgagtgctgcttcaatatcttgaattccgtttgaagctgctacacccagggcaccgaaagccaaactgcatgctaccaatgacccaataaaagttgattttttgatcttcatctagttcctccgtaggtaaagtataatgataccaaagcagtatatcatatgaaattatattatgcatacaaaattttactgtaacagatatggagttgacaaaagaaaagctatagactaatatcattaaatagtaataattacgattaaataagaggaggcaacaaccatgagagtcattgtaactttagcctgcaccgagtgcggggaccgcaactatacaacaaccaagaacaaacgtaaccatccagagagacttgagatgaagaagtactccccacgtttgaagaaaatgacgatccaccgggaaaccagataaaatttttttgttatttttaaatcgtaatatttacgaaaagagggaatggcatgatactatcctccatgcgtgatgttgtatttggatatggcaaagagccggtcattgatcaactgtcgctggatatccatgtgggagagttcataggcatcacaggtcccaatggttctgccaaaacgaccctgttaaagctgctactagggctattaaagccctggagcggcacgatacatatgaatccgcagttgaaacgtgggaacaagtccaatattggttatgtgccccagcaggtggcatcgttcaatagtggatttcccagtacggtgaatgagctggtccggtccgggcgttacaccaggctgggactattccgaagcttcacagcagagcaggatgccatcgttgaacgcagtttgcgggaagttggcatgtgggaatatcggaatacacgagtcggtgagctgtctggtggacagaagcaacggatctgtattgcaagagctatggctgggcaaccgcaggttctggtactggatgagccaacaacggggatggaccgccacagccgtgaaggattttacaatctgatgcgccactatgctgatgttcatgggttaacgattattatggttactcatggactggaagagatgggagatcgattggaccgaacgattactctggagcggcaagaaagtgaggaatggcagtgtttgagtacgaattcatgcaacgtgccttctgggcaggtggactgattggagtcatcgctccaattcttggggtctatctgatgctcaggcggcaggtccttatggcggacacgttatcccatgtctcactggcaggggttgcgctcggttcggtcatgaatcttaacccggtgatctgcggattcgcgattgcaattatcggtgcattactggttgaacaactgcggcgaagttaccgaacctacagcgaggtacctgtggcgatcatcatgacttcggggctggctcttgctgtggtattgatgagtctcaaaaccaatctgtccaagaccttcagctcatacttatttggatctattgtcgcggttagcgatatacaattgtggatgatggcaggtgtgtgtgtcattggtttactttttttcatcctgctccgaagatcgttatataactttacgtttgatgaagagactgcttccattggaggcgttcaggtaagaggtttatcgtttgcatttgccattctgacaggaatgactgtagcttcagccatgccgatcgtcggtgtgttgctggtatctgctctcattgttttacctgctgccttggcattgagagtgtctcgcagttttacatcagcgattattgtcgcggtaattacaggattaatcggtatttttagcgggctcacaacatcttaccatctaaatacaccaccgggaggaacaattgcactcatcctgttggttatcctattgactggaatatcagcgcaaaagctgattgcacgatataaccgcaagcgtcaccgcaaagaaacgaaatcacagcacgtcattctggtcaaccattctaggaggaatagatcacatgaaattcagtaaaaaagctacgctcggattgttgtttagtcttacacttatcgtcgcaggctgcggacaaaaatccgcttctgatgcaaatacagcttcgacaggcacttccgttccagtcgagacggaaaccgcaaaattaaacgtgcaggtcagcttctacccgatgtatgagttcaccaaaaatgtggcaggtgatctggccgatgtgcatacactcgttccagcaggaatggagccccatgattgggagcctacaccacaagatattgccagcattgaaaaagcggatgtgcttgtatacaacggtgcgggcatggaatcttggattgatcaggtcaccggaagtctgagcaatgcttcactcattcaggtggaagcgagcaaaggcatcaaccttcttgaaggtggagagcatgaacaccatcaagaagattcagaggcaacagaacatgaccacgatcatgagcatgcgaatgaagcgactacagaacaacacgaccatgatcatgacgcagaggcagaagcaggacatgatcacggtggactcgacccccacgtatggctgtcacctgcattggctgtaaaggaagtgcgcaatattgaagcaggtttggcgcaggctgccccggaacatgccgaacagttcaagcagaatgcagatgcctacattgctcaactggagtcactggatcaggacttcaaggcggctgtgacggatagcaaacgtaaggatttcatcacacaacacgctgcatttggttatcttgccaaggaatatggattgcaacaggtgcccatcgcaggattgtctcctgagcaagaacctttagcagcgcagatggcatctgtcattgattttgcaaaagagcatcaggtgaaaatgattttcttcgaaacactggtttcatccaaagtgtctgagacaatcgcaagtgaagtgggggccaagacggctgtattgaatccgattgagggactcaccgaggaagaaattgcggcgggaatggactacattagcgtgatgagacagaatctggaggctctgaaactggcactaaacgaataattaaaaatcagtttgatgcctgtcaccgaaaaaggtacaataatacaacatgctgaggaatggatcgccattcctttgcctttttgcaaagcagagagcacagtgatgtgctctctctttgtttaataaggtgaccggatcaaggagaacaggaggacgcattgcatgaatttaaatgaggaacatgaagtgctgttaagtgaacagcctgcccatctgtggagacggcgtaagctggagctgatgcactggacggaacgtgataaacatacggtatccgcgaagaaaacagagatttggaacggtgttgaagttgatgccgaactcgtgaaggcattgtccatacttcagagtgcgggcgtgaggacggaattttcatgtgcaggggtgagtccgcttgatgaacctgtcgatcattccctttatgcttatgttaccctgatacaaagtgaggttgcagatcaattcgtgcactatgctatccgtcggatgcggaatcgactgctcgttacgctagaggccgaaaagggccgttatgatctatcttcttttttcattggacacaatcggagcttctgctggtggatggagcactgtgccttacagttcggaagccgaaacgaatcgagtgaaaaaagcgtagtataaaggataggcttgtttacttgaaggtaaaggaggtatggcacgattgaataagtgggtcaaaacgatactttttctactaggctccgtctttcttacacgattcatcccattttcgtccttgttccgtaacctggatacgatgattcacgaattcggtcatgcactaatgacactgatattgtccggtaaagtgctgcgcattgaattgtacgctgatcatagtggtgtaacttactcttccatgctgacgccaggcagatcgatcctggtttctctggcgggatatatcagtgcttcactgttcgccttgctgttgttctacttataccgcaaaggcttgcacatgtggggacttggtattatgacggctgtcgctctggtgtcgctcctgttatatgtaagaggggagttcggcatgttatggctgaccgggttcatcgtactgaacgttgtcattatgatttttggtgccaagatcgtgaagtactattatctgttactggcgtttcttacgctggaagagtcggttgttagtgcggtatacgttggatttatgtcctggactcagccttcacgggcaggggatgcagcgaatctcgctcaacagacattccttcccgcgctgttctggggcacgttgttcgctttgtttgcactgtggtgtgccaagggagcactcggtctctttttccgcaaagaaggcacttcgcgatcgtcacggtctcggggattacgaagagcgtaacggatataaagttatatcattgcaaagaaggcacttcctttcttcataaaaggatagtgccttttgtttttggacttacaatctgatattaaagtctgatattaaagattattgaacctaatctccaagattatcccataacacataaaagtaataaatctcttccataatcgccttatcgtcctctgcggtaacgccgcccttgatccgagcaagcgtgcccagaatatcatatatcgtttcacgttccacactgaactgaatgcggttgacgactttatcccaggccttcattgcgtaattaacttgagacttggcttcagtccatttattcccctcaacctgtttctctaacgtttgtatagattcaagcaagcgatcatcggtgccaaagggctttttgagaaaggctccgctagccataattgcaacgaacacaagaatgaggaatatcggaagcacatataacagccagaaacgcgttttcattcaaccgcctccttcaagtaaagaatttagaaaggcccctcataatcgcccatatcgattttttcggtgattttatccttgaacagatcaacatacaatttgtcattaggcaatatggcggcaaaagcaatatcctgtatcgtgatcttttgtttcttaagctgttcactgagccagttgatatctttatttctttcctccaaattttgcttaatcagcaggccatcaatgataatctcggtcatcagcttgctcttgggcgggtgcatatgcatatctttggcggttacaggctgattctcaggtttcaaaacaaccgagaggctaccatccggctccagaatcgcataatccagcgttgtaatatcaaatacatccttttgccgcagcatcatggtcaattcatcaaatttgactcgcattttactcaggttttgttcaagaattttaccgttctggatgatcaatgttggatcagagtccatcagtttggagatggtgcgatttttcagcgtaatatactgaaagatgatcgtaatgattgtgaaaatggtcaaggccacaaaatgaatccacgccttggaggaaagatcggttgcaaaagtccccgcaatggaaccgattgtgataccgttaatgtaatcaaaatacgtcaagttacccatctgttgtttgcccagcacccttgtatagatgatcagggtcagaaaggcaataatagaccgtacggcaacaacccatgtttcttccatcatatatgtatcaccttcctttatttcaccgtagctgtaataagagattgtttaaaaagtttgcttttgaacatgtattataacaagcttttcctatgctggaggatcttatgcttaaacgcaaaaaaccgaaacctgggtatgtatcccaagcttcggtctctataaattcactatattagttgaactgattcatttacacgtaacggagaggaaagaaaaaacctgaaaaagcgaagcgctcgcctttatccccggatttctccttcggagaagtgaatcgataaaatctggggataacagcgattggaaggttgttctttcatcggagtgtctgtgtaagaaatcgttaaacaccggaatacgccataaatccgccatctaccggaatgactgtgccagtgacaaaaccggattgtctttcatcggcaagccacattaatgtgccaagcaggtcttccggtttgccgaagcggcgcataggagtatgcgcaatgattttactcgaacgctccgtaggtgagccgtctggttgcagtaatagattacggttttgctcagtcaggaaaaacccgggtgcaatggcgttgacacgaataccggattcagccagatgaacggcgagccactgcgtgaagttgttaatcgctgccttcgcagcgctgtatgctggaacttttgtcatgggcgatggggcgctcatggaagaaatgtttatgacagtagcgggaacatcacgctctatcatatgttttgcaaagatctgagtagggatgagagaaccgacaaaattcaaatccatcacctgacgaaatccctctacacttacatcgaaaaatgtagtgacatcgctcttttccagatcttccaatctgaagatttcatttgtggtgttggcactggcgttattgccacccgcgccattgatcagaatatcacatggtccgagctgttccagtaccgaatctgccgctgcttgcacactatcggcctgggttacgtcacaggcaatagcaatcgctttgccaccggcagcttctatcgcagatacaacttcctgtcccttggacaccgtgcggttcaggatggctacacttgcaccgtgccgagcgagttcttccgccatggagcggcataatactccagcacctccggtgattacagccgttctgccttcgagacgagatgagcgttcatattggtgttcactcatgcttttgccctcctttgcagggaatcccagacgccccagagatacatgatccccaaagcccggtcatagagtccataaccaggtcggcactgttctccccagaggtgacgaccatggtcgggtcttgcataaccttcataaccgatatcgtgataagcctcaacaacccccgcaatatcgacgcttccatcttgactgcgatgtgacgtttcaataaagtcgccgttttcgtagattttgacattacgaatgtgggcaaatggaatccgatccttgaactcgtgtatcatcccgataatgtcattatcagcattcgctcccaaagagccactgcatagtgtcacgctgttgtaagggctatcataaagattcaaatatttccgaacattctcctgacttgtaataatctttggtaatccaaagattggccatggtgggtcatccggatggatggccattcgaatccccagccgttcggctgtaggcataatctcttgcaggaaataacgtgcgtgctcccacatatgatcctcggttacatccttgtaggcttcgaacagacctgttaaatactgcaatcgttctggttcccaacctggcatggtgagtgcggagttttccgtaatgcgtcgaacgagttctagaggttctatatctgcaagtttactgtgctcatagaagagggcagttgagccatcctccatttccttgtgcatatccgtgcgaagccagtcgaagatcggcataaagttgtaacagatgaccttcacacccacctgagccagtttctccattgttttaatataatttgcaatgtatttatcccttgatggcaggcccaacttgatatcctcatggatgttcacactctcaacgacatccagatgtaacccggccttgtctgctgctgttttgacagcgagtattttgtccatcggccattcctcgccagcaggaacatcgtgcagtgcccacacaataccttcaacacccggaatctgccggatatgatccagcgttaccgtatcattgccttcgccgaaccagcgaaaaaccattctcatcacgttcacctcatcatgaatagtaggaagaaaaattcagtcattgaaaataggacggatatgtatcctgcaggacagccaaatcggtgacagttaaatgcaaatgttcctgcatcagtcgctctgctgtgtcggcatcatgctgctgaatggccttgaccatagaccggtgctgttcaatcaggtgatcccactggtggtccgaggacaggcgtaacatgcgacttcgattcaaatgtacattcatctgctggataacagtccaggtgttgcttttgttgcagcctgcaaaaagagtgctatggaattcctcatccaattggaacattcgttcatcatccggtttgaccctgcattcctgttgccaagcaaggttctgttcaagagcgaccatctgttcgttcggaaagttctcgcaggcaagcctgattacggctcgttcgagctgttcacgcatgaaccgtgcttcctcaacgagatcgacctgaatcagagagacgtatgtgccacgctgtggatacacttccagcagaccttcctgtgcaagccttacaaaactttctcgaacaggtgtccggcttacctggaactccagcgaaatttccttctcagaaatagctgtgcccggaggcattttcaaactcaaaatgagttgtttcagcgtgaagtaaacgacatctcgcgttgagtaagattgcttattattcatggaagacatattgctcgcaacaggcaacaaaccggctctggatgataactttggggtatattccacaacttcaactccttcaatgacatactaccatacttgtatggtagtatggaagcgctttataagcgttatattaaatttagttgatggttcacttgcagttcaagtgattaaagagtacaattcagtcattaggttcgaatgtttaaactaacagacatcaaacagagaaatatacgtagaaatattgaagaagaaatagtatagaggtgaaaccatgggacaaaaagcaattagcgtttttcaaaactgtatcccgttatttcaggtgttaagtgacaaccatcgtcaatccattttgctgacactcaccgagaagggcagaatgacagtgaatgaaattaccgaacaatccagcctatcccggccagccatatctcatcatctcaagctgttgttagagaagggactgatatctgtggagcagaagggcacacagcgttattattcggcttcattgaatgcatcggtggaattgctgaaggaactggtagctgctttggaagaagagtgtctgtagagtaatagtgataaaacatgcttttgcatgtgtcttataggttcgtaagtttaaacacttgatcaataatgaatagaggagtatgtatatatgacaacgactatacaggaagtaaccagtcaggaagttgaacagattttggagcagcaacgacagttctttcgttccggggcaacaagatcggcagaagctcgaattgcacgtctgacccaactgaagcaggctattcaaaagtacgaatccagactgacagaagctctgtatcaggatttgggcaaaagtgagttcgaatcctacacaaccgagatcggatttatgatggatagcatcacacacaccattcgtaaagtgaataaatgggtgaaacccgttaaagtgaaaacgcaaatggcgctcctgggttcgaaaagttatatcatacccgaaccctacggggcggttctgattatcggaccgtttaattatccttttcaactcttaatcgaaccattggtaggtgctattgcagcaggtaacacagccgtgctcaaagcgtcagagaatacacctgcggtgtccgctgttgtacgtgaaatgattgcgagtgtgttcgaaccggcatacgtacaagtgctcgatggtgcaaaagatacaacaacagcgctgattaacgcgccattcgactatatcttttttacaggcagtgtaccggtaggcaagattgtgatggaggcagctgccaaaaatctcgttcccgttactttagaacttggaggcaagagccctgtcatcgtggatgaacaggcggatatcaaagtagcagctgagcgcattatatggggcaaactgctcaatacaggacagacctgtatcgcacccgattatttacttgtgcatgagcgcgtgaaggaaccgttaactacagagatgaaggcagcaatcgtgtctttctttggttcagatatccagcacaacaaggactatgggcgaatcgtgaacaagggacattttaaacgtctgacgactttgattgagcgggatcaggccaaagtgatatatgggggagcttcggatgaggaagatcgcttcattgaacctacactgattgatgcggagtcctgggatgcagcaacgatggaagatgagatttttggaccgattctgccgatcattagttatcgtaacctggatgaagccattgtagaaatcgtaaagcggccgaaaccactcgccttgtatctgttcacttccgacacccgggttcaggacaaagtgctgcgcgaagtttcttttggaggcggctgcattaacgataccatcacgcatgtagcgaatccacgtctgccgtttggcggtgttggtcattccggtgttggctcgtatcatgggcagtacagcttcgaaaccttctctcatctcaaaagtgtactgaaaaaaagcaccaagttgaatctgccgattctgtatccaccttatgataacaagctgaagttgattaagcgtttgttgaaataacacttcatattaaatacagagaacatcttgaatcgaattatgaaaaagttgaatcaaacccgacagcctgctactggacttcattccagagcaggctgttcctgtcggtaacgggagggtgacatgccggaccagcgcttgaattgacgactgaaatgggcaatatccttgtaaccaagcatgacggcaatattttgaacggagagcttcggattgcccagaagaagcttcgcttcatgcaaaaccaactgggataatacagcacgtggagactgaccaaacacctccttgaacacgcgattacagtgagaagaactgatgcccagctctgctgcaatatcatcaatgccatagtgaccgttggactcgtgtccctgtttgaattgctgactcatcaggccttgcaatcgattacgaatctggtgggcgagttcgatcttctcgtgtccgtcggtaaaccagtgagctgcctctttcgagacagcctcccacagatggccaaatagttcaaataccgcagattgaagctgcatacgctgtaccatcgtatttgctgtttcatcatccgcagatgacattaatttgcgcaaaaccggctcaatctgctgtgtaaccggactatccgcactgaatcgcacttgtttgatacgtgccagcaacgataggaacaactgatcatcaatgtcaaaatgcatgcaaaaataagtgaatcccttaccgttatggctctggctggaatgaatgcttcccggaggaatcaggagcagttcgccagccttttgaatatataaggtaccgttcaccgtcatgcgttgctcgccttcagtgacataattcaattcatattgagggtgctcatgcgccggataatcccagtccatacccacacttcgtaaatgaatggcgaacagattaaccgttgtttgcacatctggataaaaaacttcatggacactttctcccaaagtaggaggcaaatacgttgaagacatggaagatcctcctttatttagacgttgttcaaaaaatgtgattttgagtacgcacgtatatcaattggaatgttttttttgtaaccgctttaatccattatagtctatcagcttgatttgggtaaatatctgattgatttgatcatggtcgaaggtggaaccacgtgttaggatggggctaatgaaaacgtatgcaaccattctgagaggggttatgattcatgagtacttccaaatccatcttttataatgcacatcacgcaccgattggtgcttttgcgagttttacactgggttacaaaggagccaaaggcgggctcggtcttgaactcggcaagccggctgaccagaatgtatatattggattacaatctcgcgatggcgacaattatcaggcgcttcctttttatgaagcttccgaggatgagagcagccgctatgatgtagagaagttggagaatggggacacggcgtcgacaacagcgtccaaagttccacaacctcttattacggcttttcgcgatgaagatattacccgtgattttacctcaggtacagatacgtggactgctggagatctgacgttccgtatctactcgcctgtacgtccagtacctgatccaaccaatgggaatcgtgaagaattaatggatgcgctcgtaccagccgtattggttgagatgacgattgacaatacggaaggtcaacaaccccgcaaagcctactttggttatcagggcaatgatccgtactctgcgatgcgtctgattgggggaccggaaggtggctccatcacaggtgtgggacaaggtcgacttacagcaattatgtcagcagatgacggactgtggcccgcacgcggatttacgttggagaaactgttgcaggagaaacatcgggagaatctggcatttggacttggctcaaccgctgcactactgatggaggttccggctggagagaaacgtacgtatcaatttgcagtatgtttctatcgcgggggcattgtgacgaccggaatggacacaacgtattggtatacgcggtacttctccgatattcaggcagcaggagagtatgcacttcaacgcttcagtgagttgactgcatcctgtggagaggttgaacaacgccttggatcggctgctttgaccgaagatcaatcattcatgcttgctcattccattcacagctattatgccagtactcaactgctggatgccgatggtgagccactctgggtggtgaacgaaggggaatatcggatgatgaacacacttgatctgacggctgatcagttgtacttcgagcttgccttgaatccatggacggtgcgtaatgagctggagtggtttgtgaaacgatacagttatacggatcaggttcgtttcccgggggaagagaagttatatccgggcggaattacctttacccatgatattggtgttgccaatgtgttctcacgccctggacactcggcatatgagctggttggcattgacgactgtttctcacagatgagccacgaggagctggtgaactggctctgctgcgcgacagtatacattgaacagacacaggatcaagcttttgtgaaaaacatgttgcctgttatccgggattgcttcgaaagcatgcttaatcgtgaccatcccgacgctgagcagcgtaacggtctaatgggtctggatagtagccgtacccaaggtggagcggagattacaacttacgacagcctggatgtgtcacttggtcagtctcgcaataatatctatctggcgggtaaatgttgggcggtctatgttgcattggagaagctgttcgcaactgagaagttggccgatctgtcccatcaagcagggcttcaagcggatcgctgcgctgccagtattgctgcacagttgactgatggcggctacattccagctgttattgcagaaaataatgattctcgaatcattccggcgattgaaggtctggtgttcccgtactttacaggctgtgaagcagcactggatgtcaatggtcgttttggaccttatctgaaagcactccaaactcatctgaagacggttcttgtaccgggaacatgtctgttcgaagatgggggctggaaactgtcctcaacaagcaataactcgtggctgagcaaaatctatttgtcccagtttatcgctagagagctgctgggtgtggaatggaatgagacaggcaaggcagcagacgcggctcatgtcaactggcttctgcatccggaggaatcctactggtgctggagtgaccagatcctgtctggtgtggcggttggcagcaagtactatccgcgtggtgtaacgtcgattctatggctactcgaaggaaaagggaatcaccttgggcagatctatgccagcaaggaggcggtacaatgagccaatccgtcgttcaatctgctttgtcgggtccacagtacgatgcgtggctggggtatcactctgaattgccaagagcgaatggacttgcccaaaagacggctcctgcgtggagcaagctgatattggtggaagagaaccatggagtaattacaacagctctgaccgaactttcacggggactggagaggttatatggcgtgaaaccgtcggtcagtcatctgtctgatgctcaggaaagtgaacggggcaatcatgcttccgctcccgcaatacgaatcggcacttggacagggagcgcttccgtggctgggttgttcagcgagacagagcgttcaactgttcaaggggaagggtacatcattcgtgagaacgagaccgagggtgtactggtcattgggtcagagactccccaaggtgtgctgtatggtgcattccatctgcttcgagagctgacaatggatcaagggagtgcacataaggcggatgacgctgtgaataagtggagcttcattacagaacagccaaccaatgcgctacggatgattaatcagtgggataacgtggacggcagcattgagcgtggttacgcaggagaatccattttctatgataacggggaattcacactggacttgggacgcatccgggattacgcacgtttgctcgcttccacgggaatcaatgccatatcgatcaacaacgtcaatgtacaccgccgtgagagtctgtttctgacagaacgttatcttagtgatgtggcgaaggttgccgctgaattcagagcgtatggcattcgattgttcctgagcgccaactacgcaagtccaattgagattggtggattgcgtacggctgatccgctggatgcgcaggtacgggaatggtggaacattcaaacggccaaggtgtacgcagcgattccggattttggcggttacctgatcaaggcagactccgagaatcgtccgggaccgttcacgtataaccgtgatcatgccgatggtgcgaacatgctggctgaagcccttcggccattcggtggattggtcatctggcgttgcttcgtctataactgcaagcaggactggcgggatcgttccactgaccgtgcgcgggcagcctatgaccactttacgccgctggacgggcgttttgccgaaaatgttattttgcaaatcaaaaacgggccgatggactttcaggtgagagaggcggtatccccgctgtttggcgccatggaaaatacaaatcaggtgattgaatttcagattacacaggagtataccgggcaacaacgtcatctctgttatctggttccccagtggaaagaagtattggactttgacacatacgccaaaggcaaaggttcagagatcaagcgaatcgcggacggttctctgtataaacgaccatacagtggcttcgccgcagtatccaatattggtgcagatgcctgttggacagggcatccactcgcgcaggcgaatctatatggatacggaagacttgcgtggaacccggagctgtccgccgaagagattgctgatgagtgggtgagactcacatttggacatgaagacgaagttgtgcggcaggttacgggcatgcttttgacttcattagatatctatgagaattatactgcgcctctcggtgtgggttggatggttaatccggaacatcattacgggccgaatgtagatggatacgagtattccaaatggggaacgtatcactttgccgattgtcatggcattggtgtagatcgaaccgtgaacagcggtacaggatacacttcacagtatcaccctgagaatgctgatcgctatgagtccgtagacacctgtccggatgagctgatcttatttttccatcacgtgccgtacacccatgttctgcattcgggtaaaacggtcattcagcatatttatgatacacactttgaaggtgttgcgcaggcggaggcgttagccgagacatggagaaggctggagggtaaaatcgacccagtcattttcagcaaagttgcttcattacaggacaaccaggccgaacatgccaaggaatggcgggacatgatcaatacgtacttctatcgcaagagcggcatagcggatgaacaaggtcgaacaatctattgagtggaattgcggatgcagatgaacttggtaattaggaaggaagtaagaagataccttgttttctttgatgtacaatagacagcatggacatacatgaggaggagaaccgtatgggacaatatcaactgcctgagaccatgaaggccgctgtcatgacagagccaggacacattattattgaggaacaacccgtcccgcaaccggcagcggatgaggtgttaatccaggtaatggctgtgggggtgtgtggctcggatgtgcattattttgaacatggacgcattggcagatttgtggtggagaaaccgatcattttgggacatgagtgtgcgggattcattgctgctgttggctcgaacgtatcccgtctgaaaacaggggatcgggttgctattgagcctggggtgacttgcggacgttgcacggcatgcaaagaaggtcgttataacctgtgtccggatgtacaatttctagcgactcctccgatggatggggcatttgtacaatacatggtgatacgtgaagatatggtattcccgatcccggatcatctgtcttatgaggaagcagctatgaacgagccattctctgttggtattcacgctgcacgccgcagtaaactggctccgggtacaaccctggcgattatgggcatgggtcccgttggactcatggccgtagctgctgccaaatctttcggtgtagagaagatcattgtaacggatctggaggaagttaggctggaagcagctcgccgcatgggtgccacgcataccattaatgtgcgaaatgaagatgcgctggctgtgattcgcgagttaacaggtggtgtgggtgtggataccgcatgggaaacagcggggaatccgaaggcgctacaatctgctctgtattcacttcgacgtggaggcaaacttgcgattgtgggcctgcctgcacaagatgagatcgcactcaatgttccatttattgcggacaatgaagttgatatctatggcatattccgttatgccaatacgtatccggcaggaattgagttcctgagctccggccagcataacgtgatgtctctgattacagatcgttattcactcgaagagacacagcaagcgatggagcgcgcattacacaataaaagcggcagtctgaaggtcatggtatatccgaacggtatgtaagaacaacctggaagagtcctgcggttcaggactcttttttttgttttttttgcaaaaaagtatgggtcaagctcccataacatggtataattcatgaagattttaatatataaatggatacacaccatattggtgaatacgtacttagcgaaaggaactgaaggttgtgagagtacatgaatttatgatacacgctgattttcatcgggatgatctgatgtcggtatcttctcaagcgtcgcgtttttcctcggatattattttgtcgtatatggagtctgagcatgagcatcgtgtagatgttaaaagcctgcttggaatggcgttactacccattcgatatggtagtgttgtcagattacagacaagaggcagggatgaactggaggctttggagtacatgttgaatgtactggagaaagggacggcttgacacctgattaggtgcaaaatcacagatatcatattttttttagctattcctcaaaacctgctggtactttgtccaaaaaaagagtataataaaatgtagtttgattctaaagaagtacccatattaaaggagtgtaaatagattatgccaaaagttgacatccatccaaagacacaactcgtaattttttacgatgcaagtgctgatttcaaattcctgagttcttccacgaagttctctaacgaaactatggaatgggaagacggtaactcttacccagtaatccgtgtggacactagttccgcatcacacccattcttcactggtaaacaaagaaacgtggatatcggtggccgtgttgataaatttaaccgtaaatacaacatcaccaaataagtttgtccatacatcacaaaaaaacctcgggatttgtcctgaggttttttttgtgtacattaaaaattaattcaaccaattattgcgcttacaacacattcggatgtacactaggaaacgagtacgaacatattggaggaggaaatagagatgagcagcatcacacatatggtaacgtttacactttacgcgggtaaagatacaccggaggccgaagcctttttgaaggaaagttcagatgtactggctgtcattcctggcgtagagcaatttcaggttctgaaacaggtaagtgagaagaatgagtttgactacagtttctcgatggtctttgcggatcaggttgcgtatgatgcatacaacaatcacccggttcaccgtcaatatgtagaagagcgttgggaaaaggaagtcagtcgcttccaggaaattgatcttattcaacatcataattaatagtctccacatataggaaaaaagttgaactaccatatacagcattgaacaatgctgtatatctctctgaataacgcgtaatgaatgaacaaaagtaacttatttccgaaatcgttttcgaccaaataaattcaaggaggttttcgctgttatgcaattggatctctcaggaaaaacggctctagttacaggagcaaccggacagctggggagagtcatcgcccgcacgttggcagcctgtggcgccaatctggctatacattacataaataatgataccaaggctcgggagcttcaaggtgagattgaagcactcggtcgtcaggctgtaattgtacagggagatattacaaagcaggatacagcatttcggatgcgtgatgaaattcagcctgtcctcggcggagtcgatatcgttgttgccaatgcggtcattcaatatgaatggacaacggtgttggaacagtctcctgaagattacttgagccagtttgaatcctgtgtcatgcagagtgtgtatcttgccaaagctttcattccacatatgcaagatatcagagccggtcggttcattggcatcaatacggaatgtgcgatgcaaaacttcgctcatcaatcggcctacaccgctggtaagcgtggaatggatggtgtatatcgcgtacttgccaaggaggttggtgagtatcagattaccgtaaaccaggttgcacctggatggacaattagtgaacgtgatcggtctagtgagcctggacatgatgaggcatatacgtgtactgtgccgctgaagcgcaggggtgaggatcaggaaatcgccaatgcggtagcttttctagcttcggatttgtcctcatttatcacgggtgcctatatcccggtaagtggtggcaatgtgatgcctgctatctagtgtctgatttggattcgggaatccagatggaataacattaaacttagtttaaccgtaatccgtttgtcattcgacaagcggattttttggcattttgctatggctggaataaaggtttaaaaggcagttttttgtttcatatatccagacatacatattgagttggttcggttttcagaagattggggtataagaataggtatattaaccgagtggaaacataatcaaaatgagcaattaaaggagacccatcacttatgaaaaaaacagtcgcggacgttctggttgaatccttattgaacgctggcatcaaacgtatatatggcattgttggagactccttgaatgcggtactcgactccattcgtcgttctgggaagattgaatggattcatgtacgacatgaagaagtagctgcatttgctgctggggcggacgctgaggtcagtggaagtatcgctgtctgcgcaggtagcagtggtcctggtaatatgcatctgattaatggtctgtatgactgtcaccgcaatcgtgttcctgtactcgctatcgctgcacatatcccaagtgacgagattggcagtgaatattttcaggcgacccatccggagtatctgtttcaggaatgtagtcattattgtgaagtcattacaacagccaaacagatgccgcgttctctgacgatggccattcagacagcagttgcacgttcgggtgtgtccgtcgttgtattgccgggggatgtagcaggacttgaagcagcggatcttcctgtacctgagcatgtgtatcacgcaaccaaccccgtggtacatccttctgagccggaactcgttaaactggcggagtatctgaatcaaggcaaaaaaattacgttgttgtgcggtgcaggctgcgcgggcgctcgggaaccccttatgcagctctgtgatcgcttgaaatccccgatggttattgcgctacgaggcaaggaatatttggagtatgacaacccctattccgtgggtcttacgggtctaattgggtattcatccggttatcatgccatgatggactgtgatgtattattaatgctgggaacggatttcccatatcgtcaattctatcccgaagatgcgaaagtccttcaggtcgacattcaatcttcccatctgggtcggcgcaagaagctggattacggcgtatgtggggatgtgaaagcgaccattgaaactttacttccttatctgacagaagaacacagtgacaaacatctgcgtaaaagtgtggatcgttatgtgaaagtacgcaaagatctggacgagctggccgttggaaaaccgggtaaaaagcccattcatccgcagtacttgaccaaggtcattagtgatgccgcagctgaaaatgccatcttcacctgtgatgtcggtactccgacagtatgggcggcccgttatatcgagatgtctcgtaatcgcagactgctcggttcattcagtcatggtacgatggcaaacgctttgccacaggcaattggtgctcaggtcgctgatccgggcagacaagtcatctcgttgtcgggtgatggcggtattacgatgctgatgggtgatctgttgacattgaaacagcataatctgccgattaaagttgtggtgtttaataatggagcactcggttttgttgagctggagatgaaagctgccggattcctggaatcgggaacagagcttgtcaatcccaactttgcgatggttgctcaagccatgggcatggaagggattcgggttgaggatccggatgaactcgaaggagctgtacagcgtgcgcttcagcatgatggtcctgtgctgattgacgtggtggtgaatcgtcaggaattgtccttacctccgaagattgatattaaacaggcggaaggattcaccttatggatgatgaaagccgtgctcaacggacgaggggacgaaattattgaattggcaaaaacgaatttgctgcgttaaagtgttttgataagcggatatgcaccgtttgaagttgtaaagataccgacttaaaaagtattgtatttgtaaaagaggagcatgcaacaagacgtaatagttgtgtgctccttcaataaaaatgctgaaaatgtgacaggcgatatagtatgaatacatattatatgatttgtttttatgtcgaaagtctattagaataggtaaagtcaggaaggttttatgccatttttgacctacatattgcatcattacatgtaagtacgtttcatatcgtattcatcgatccaatcacaagatgacacacacacatggaggagatcaacatgagtcacgcaggaaaagtagccattattactggagcaggaagtggattgggccaagcagcagcattgaagctggctgagaagggtgcatccattgtcgttgtggatcttgtcgaagagacaggtcttgagacggttaagcagattgagaagctgggaagtaaagctatttttgtacaagcagatgtaagtaaagcacctgaagttgagaattatgtgaaaaaaacagtcgaagagttcggacgaatcgacatgttctttaataatgcaggtattgcaggtcctggtattaagctgattgaacatacgattgagcagtttgaccagatcattgatattaacctgagaagtgtattctacgggttgaagtatgtaattactgaaatgctcaaaacaggtggaggttccattctgaacacggcctccacagccggtattgttggtgtacctgcagttgcaccttacgcagcaaccaaacatggcgtggtgggcttgacgcgtacagctgcaattgaatatggcaaggacaacattcgtgtaaatgcgattgccccaggtacaattgagacgccgatggtcattcagttcggtaaagacaaccctgaagtattcaaggcaaccgttgatagcattccatctggacgtctgggcagaccagaagagatcgcaaacctggtttctttcctgcttggagatgaagcgccgtatatcaatggtgcagtatatccgatcgatggtgcagttacggctcaataagagttctgcttatcggtaatagaatagccgttataatggttaaagagaggccactgtatacgtacagtgcctctctttttggtttgttttttgtactacaaattcatatcatgcaacgttgtgcgatgtattggtttgtgtacttttgagaggtgctgaacgatacgagcttataacgatgatgacggcaacagcaaccccgacagcgccaatccaggtaatggatgataatgaaacgctgctgaccgcgattccgccaatacctgcgccggcagccatggctaattgcatcaccgaactgttcagactaagcatgatgccagaggattccggagccatggtgaccaggttatattgctgagttggtcctgaggaccacgcggcaaaagaccacaaaatcagaacaaggaagacagcgagatgagagcttgccgttatattcagcaggaccagactcacgatatgcagtgtcatgcccgtgatcagcgttcgtttgacacccaatctgtcagcactgaaccctccaacttttgaaccgatcagacttgctatgccaaatgcgagtaaagctgaacttagtagtgcttcgctcattcctgaaacggatacaaggtaaggtgaaatgtacgtgtaggcaatggaataaccacctaaccagaaaaatgtcaccagcagtgccaaaacaattcgtggctgtttgagcaaagacagttgtttcttcagcggaacaggcgcttctgctttggaaggcggaatggcggccgcgattaccagcatggcgagaacgccaagaacggctataccggcaaaaacaagcttccaatcccaagatgcagctacaagccttccgagcggaacgccaacaatcaaagaagccgtaaatccagtgattactgtggcgattgcactagcttgtttgccctcagccgctatttgggaagcaaccgttaatgccgtgacaacaacaacgcccgcgcccaaagccatcaacacgcgtgctgcgacgaacagtccataacccggcaacaggtaggcaagaacattagccacaacgaatagaccgaggaagtataacaacagcttgcgacggtcccagcgcgaagtcagtgcaataatgacaggtgtacctagcgcatatacgagtgaaaaaatcgtaatgagctgtccggcggcgattaaagagatattcatcgtatctgcaatacgatccaaaatgccggcaatgacatattcggacgttcctacaaggaaactgaccaaggcaagaacatagattttgagcgtagaagacatggaaacataacctctttctgattattattatatttttagaaatatagaaataaagacgatagaacaagatatgaatgctctgaatgcaacccatctgcacgaatggtaatgttacaacctagataatgaatattggtataaacgtatatttaggtgacctagttctgctaatatatgttgaaccctgtttcaatatttctaattatatagaaataaaactcaaattttttatttatttagcagatagggaacaaacttttgtgcagtctccgtgttcaggctgtagtagatatacgtgcctttcttctgcgatgtgagcagaccacaatcggacagctgtttcaggtgatgagacagagtcgatagggcaaccgtaacaaggcggctctccagatcggcaggacacaggttgctttcgcccgataaaatctgaatgattttgtagcgtgtttgttcgcccagcgctttatgaattttgacgacttgttcaatctcatttgagtttgattgcataatgatctgtcctttcgtctttatttcttatttctagtaatatagaaatacagtagcatatgttgtttgaaaagtaaactctcggacgaagattccatactttctactgcgtctgtgttaacagccgaaagtctggagtaacttcccccgagagttatgtgagttgcatattaccgatctagagaatcaacatagtctttggcttccttcaacgaaagacctctggcttcacgcagtcgtttgatcgccataatttttttcccttgttgtataagtgtaagcagttcctgatccagatccgtttgggctggttggcttgtatgggaaggaggtgcttccttcggcgacaaggtgtaattgaagtcggatcggacgctgccggttgaaccgttctccagacgctcgacatctcttttcaattcatttaattggcgttgcaggctggtgactctgaccagtaacacaaagatcagaagcagcaaaacgatccataccaaggtgttcatttccatgatgtaatgtgcctcactttcatttattcatatttagccattattttagttgaaccgggatttccttgacaccacgaacattcatacctggtctccattccagttcattcacatctgcctgaagctgtatatttggaaaacgattcagaagtgtgctgactgcaatctcaccttccagacgagcaagcggtgctcccaagcagagatgaatgcctttgccaaaagccagatgcgaactcttctcgcgtgtgatatcgaaaatatcagcatccttaaactgctgttcgtcccggttggcggaatcaagcgcaacaatgacaagatcaccttgagcgatacgttgtccacggaattcaatatcttccagagcccagcgggatgtgctgaactccaccggtccattatagcgaagcatctcttcaatggcattgtgaataagctcgggctggttgatgagcagttcgcgttgctccggatgctccagcagggcgagaatcccatttccaatcagattcacggttgtttcatgaccggcaataattaataaggagacaacgccaagcagttctcgttcagttaactgctgcccggattcttccgcaatgacgagctggctgatcagatcagtgccgggatctcggcgaacttttgcaaaccaggccgtcaggtaatccgtaaactccctggcatgttgctcaaacagctcggcgctcttggctatggaagcatcaattatcgtattggaccagatgcggaatttgtcacgatcgtcaagagggactcccaaaatttcactaatgacaatgatgggcagtgggaaggcaaagtcatcgatcagattcattttttcctgtgacgggaggttgtccagcagttcatcagcaatgtcctgaatatggctccgcatgtctgcgaccagtttgggtgtgaatgctttctgcacaagtccccgaagacgtttatgatccggcggatcggagaacaacatattattggagaagatgctttgattgtcagcgccgtaacgtcggaccatatctttgctgaagcgaggatctttcaggatttgaactgcatcctcgtatcgcgtaataatccagccgaattccccgtgaggaaacatgactctgaaaacaggctcctcttttcttaacatttcatataccgggtaagggttgtgtgtgaattctttggtgaaaaacgctggctttgaggactctttgggttcattcggattcaaatgcaaaatctcctctcatattcctgcataatacctgcaccatctatatattcaatacacaagcttttgaaaccttgttttttcttcatatggatgatagagcaggaaaatagaggaagatggaagaagacatggtagagagaatcggttattatgcttggtaaaaatgaaaatgaggtgaacgctcacatgtcttacgcacaacttcctttgcatcaccaccagattccggcaagtcgaattgttcttggctgtatgcggtttggtggtgaatgggatggtcttcccattacttcagatcttgttgtagaaggtcatcgagcggtagaagcagctattgaaatcggcattaatcactttgacctggcgaatatttacacacgtggtaaggcagagcatgtcttggggcgagttttatccgaaactcccggcttgcgtgaacagatcattatacagtcgaagtgtggtatacgtcttgtgggtgatgatgaaggaccgcagcgttatgacacctcaggtgcacatatcctggcgagtgtggacggtatcctggaacggctcggaatcgattatctggatattttgctgttacatcgtcctgatccacttgcccatccgcaagagattggagaagcactggctgagctgcatcattccggtaaagtgcgccattttggagtgtccaacatgggttctgaacagattcgtcttcttcagcttcatagtaaagtacctctgattgtgaaccagctggagatgagtctggacaaaatcggattcgtagaggctggtgtgacggtaaatcgtcctcaagccagagacaacgtgtttccctatggcacgatggaatattgtcaggcagagcatattcaactgcaagcttggggtccccttgctcaagggcgatttactggcagggtagttgagggacagcgggctgagattgagcatacggctcaattggttgatcgaatggctaaggagcgtggagttacaccagagtctattgtactggcttggttaatgaagcatccagcagggattcaacctgtgattggttcgattcgaccagaacgtattctggcctgtcgtgatgcaataaatattgagttaacccgatatgattggtacgagctgtattcggcttcgtgtgggcgtagaatgtaagtagagtcttctgagagattggttcgtttcgatcaaaattcatagatgttgggtgaaatttgaacatataagaagacacaggctgctaatggcctgtgttttctttgtgatattcagcttcatttggttgaaacacacgatcgaaagtgtaatgattcctaaggtcatatggcctacaatgcttttaaatgagtaataagcatgctgattctgatctgaaaccagtatgttggcacggctgtaaggatatttcaccttcatatttgcgctagaggctatgtccatggacttagaagaagtgctgataagaaggacgtttcaaccatttttatcgttttacagggtagttgctggagtgctgtgataaaatgataggaataagaacatacgatctgtttatgtgagaggagacaccttgacgatggagatgcttaaaccacccgccgagacattatacgaggttgaattacgtgcgctgcgagaggaagatcaggggaaacgtcccccgaactggctgttatctcccgcctatgtgcgcgattttattataggcagggataagcctgcgttattaaatggagaagagatcacgattacccgcaaattctatggcaatgacgtgttaattgaacgtgcagtggttactctggcaggcaatcgaggattaatgctcgtgggagaacccgggacagccaagaccatgcttagcgaactgctgaccgcagcaatatccggaaccagtctaaacacgattcaaggtacagcaggcacgacggaagatatgatcaagtattcttggaattacgccatgttgcttgataaaggcccttcggaagctgcacttgtgccatcaccgttatataacggcatgaagaaaggcattcttacccgttttgaagagattacacgttgtccagctgaagcgcaggatagtctgatcagtattctcagtgacaaggtcatgagcattcctgaactggatggtggtgtactgtttgcgcaaccgggatttaacgtcattgctacagccaatattcgggataaaggtgttaacgaaatgagtggtgcattgaaacgtcggttcaattttgaaacgatcaagcccattcataacgtaaagatggaagccaaaatcattgaatcccaggcacgaagcctgttgttacatagtggaattgatattgaaattaacccggatgtggttgaattgctggctacaacatttatggaactacgcaccggcatgacacgggaaggatacaagctcgatacccctcaagcatccatgagtacggcggaagcagtgtctgtctatgtccagagtgcgatgacttcctattattacgaagataaagctattgcactggataggttggtgcagaacatgctgggcaccattgcgaaggaaaacgacaaggatctgtccattctcaaaacctacttctccaaggtcgtaaaagagcgttccagagaagagggaatgtggaaggactattatgaggagagaaaatggatcggttaacagcagttctggaccctgatgttgagcagttacaatccttgttcgagtcccaggtatataacctgagtaatcatacggtttattatccaatacgacaccatagccctgcatgttcatatcacttgttacgattaatcggggactaccaaccggatattattctgatcgaaggaccggagagtggtaatccattaatttcggtgctgagtgatgaggcaacgatacctcctgtcagtctgtactatacctatgagagtgaattggagagagaagcttgctattatccgatgcttcgttattcgcctgaatatgtagctttgaaagaagcaaaacggctggatattccggcgaagtttattgacctggactatcaacacttctccactcgtgcatccaaatccggccagacagaacaaaaggagatctctattcaggacgaaaccttgcttgcggggtctgatttcattaaccgattatgcaaaaaaacaaactgccgcagttttgatgaattgtgggaaaaggtgtttgagattggcggcctggaaaaatccactcaggcattcgtgcaggatgtattcacgtattgtactctatcccgaatgtgttattccacggaacgattacagtcttcaggtgatctggcaagagaagcacatatgagacaacgcattaatcaagcggtgcaggagcatgaccgtgtgcttgttattacaggtggatttcatacgtatggactgttgatgtcagagaaatatgaatcggaattggaacagccagaaatggataaacggcatacagaccaacgtttggatggacaaggtaaaccaggaacgtctcaacaaagtgcggttaatccagatacggttcaccaacaaatgtacccaatggtctatacctttgctgaagcggatcggctaaatggatatgcgagcggcatgccttatgtaaattattatgatcagatctggaaccagctgcttcgcaaaaagagtacaccgtataatctaacggctctggacttgttatcccggctgatgcgtcaattacgggacggacacgagcatgtatcaacgagtgatgcgattgaggcgtacagcatgattcaaggtcttgccgggcttcggggtaaaagggaaggcggcgtctatgagttgatggatgcagcactctcttcctttgtgaagggtgagcttaccttggcgactgataaaccgttgcaagagctgcagcagttattgacaggagacgtcattggaagcgtggctcccaattcattcagtattcccatcgtggaggacttcaaggctcgttgtacagagtacaaactgcagattcgtacaacaggtcaacacaagaaagtgctggatctgtatgcgaaaccggagcatcgtcagataagccaattgattcaatgcatcacctatctggttccggaattcgcgaaacggcaatcggggccggactggatcgcagagcgtgatatgaatcttgttcgcgaaacctgggtttatatgtactcatcccgcattgaagccagattgatagagaactctctctatggtggaacacttgccggggccgctacacgcaaaatggaagaacagatgcaggaagtaccggatcatcatagcggtgaacttgcccgactcatgcttcaagcgctgctcatgggacttcaggacactgcgatgaaactttatgaacaggtccgttcagcgctgagaacggacgggaattttctatccttatgtaacagtctgcatgtcttgaaccgaattcatcaacaccgcaggttgctgggattatctgacgagcaacatctccctgacctggtatccgaagcttataggaatgccgtagacaagttgctacagctctccagagccaatccggatgaacatgaagctattattcagggattgaagctgctagccatgctcgcggagtcatcagaggagaattttcaggatgagacattccgaattcacctgaatgagcttctgtctgatcaccagcttccggctcagctggagggtgtgtgtgtggctatttcctcagggctcggtgacaggcccagggatgagattgttgatcgtgctcgcgggtatatccatggtacaccggatcagacccgtcaaacggcactttttttacagggagtattcactgtagcacgtgacgcttttttatatgaagatcagctgttgtctgagttgaattatctgattgaacagctgtcatacgacgacttcatcagtatggtaccggaattgcggttggcattcacctactttacaccaatggagacgggcttgattgcggagcgggtggcgagtctgcatcaggttgaaccagaggagatgttgaggcctgcggtggatgaacagatgctgattcagtccaagacgtgggatgaagggcttcgaaaggagtttgccgcatggaagctaatatgaatgaagcgaatcggacagcggaaggaaccggagaaatcaatgaaagttccaatccggatggaagcaaccgaggggatcaacattctgctgaaaccttaaatcgatggcgtctgattctcggtgaatcggcggaagaagggttgtgtaatacagaccaatacacttctgctgaatttcaatatacggaaatcgatgagattctggggtatctgtataaccgtgaatacggtgaagaacaaggttaccgaaaagagggaggacgcggtgcgtctaacctgactgtaccaaaatggctgcacaaggtcagggatttattccccaaaccaacggtagaaattttggaaaaacaggcgcttgatcgttatgggctgacagaattgttaacggacaaaaagctgcttgaatcccttgaacccaacatgaatctgctcaagaacattatgcagttcaaaggacggatgaaaggtgaggtattaaagagcgccaaggatatcgtgcgaactgtggttgaagagctccgcagcaagctggaatcgcagacccgagccagtatcatgggcaagcgcagtcgctatacctccagttcagtgcgatccttgcgcaatctgaatttcaagcgaaccatcaccaagaatttgaagaattacgataaaaacaagcgcaggtttgtgattgatcgtctgtatttcgacgggaatatccagccccataacaagtggaacatcatcattggtgtggacgagagtggcagtatgctggattcagtcatctacagttcggtgatggccagcatcttctaccgcttgaatgcgctgcgcacgaaattattcatatttgatacgcaggttgttgatctgagcgatagactggaagaccccgtagacgtgctcatgaatgtacagctcggtggggggacacatattacgaaagcgttgcgatatggcgagacgttaatcgataatccaggcaaaaccatctttattctggtcagtgatctggaggaagggtacccgatcgcgcaaatgtataaagcctgtaaagatattatcgatgcaggatgcaagctactggttctcaccgcgctcgattttaacggggattcagtctataacaaacatgcagcacagacgttaaccaatatgggggcacatgtagcagcaattacgcctaacgaactcgcggattggattggcgagatcatcacttaaattcaaggaggaatgtgtaatgcttaccgcagaccgcgcagttgaaactttggtggagaaattcgcagtaacttgttcaaacgagtattcattaaaaacagatcgaagctccgaaattattgattacgtcttgggaacgacagacaagttcccggatatgttgggaaattcgagtcattatgtgtatcaaacgattgatctgctcatgaagcttgccaaaaaagacaatggagatatcttttaccgtgccggggctattgtgatatatctggaatccaattattccaaaagaaattcatggagaacggatgcctttactgtctgtatgggaaatgactccgaagcctacggattaagcgggaagagcaaaagtgctgatcgtatggatggattgttatcccggttggagaagatcaaacagtttgcaggcgagaacgaaattttgactgaattaaagagtaaattaaagcgtgcccagtggctttttgattccaaaaaagcggacagtcaaggggattaccgggatgtgattaatgcattaatgctgctgcaattatattcaagactcagtgacacggcttctcatcttgcagaggttcaatcttctgttcaatcgttaccagtgttgtttcaacatgtgatggctaatgatccagataagttgcgggatgagctacatacgttgattgaacctgtagtggtcagtaatattcaaggaaagcataacggatcttcccaagaattgaaggatgaattcctcaaggagaagcgtagtcagctcatagctgagctgtatcccaatacatcgttctctccaaaagagcaatgttcacacactgtattccaccaaactatggtgcttgtgagtggtgccttgttgtacctgattaacattagtggaggtaaacaacggttccttgatacaaatagtgagattgggcatgttttgcttcacacaatacatcaattacatgagatctatccacttgaagttcgccgttacttgctgagtatggaccctagagccaagagtccaaatgatctgcttgctggacttgtgcctctggatgagccttatcagttggttgaaatgttgcgggacgagcttaattcgtacacggtatcttggaacatgttacaatccgcgatcgcgaatcgtcctgaacaagcgattcgagcatacgagattatgaaaccgccattcctcaaactctgcattcagaaattcatggaggatcaaggattgacattgcctaatgcggaggggtcactggagcaagcggtatttaacgctcttcggcatcctttggacgggggacgtcaagggcttgcgattgcaagatacttaagtggggaaaacaccctggaggaatattgggaggacccgaatagtcgcgggttgtttaatcaactgaatcgggataagaagcgtgttcacaacctcattagtattagttttctgcccttggactcggaggcgatgcgcaggttcgcaatcctgaccactcatccagattggacactggatattatctcggacatgtacaattcatatgcgtttagtggagagcagctgcttcaacgttatgggcaagatcctgaggtgcaacgtgagaaattgctaaccagcctgatctcactcaatggcatgaccgactacagatacaaatcgatgccgcatgacgaataccgccgaatcattcagcagaatctggactatgcactgacacagtacaagaaactgccaacagatacacgcattttaattctggagattacctttgaacagcgtgatgagttatcgaagaaaatattggccgaagcgattcgtgccggactgcaggattcttccaaaaaggccaacggcgtggcgttagcggaattcaaccgaattcctgatcaggacttgtatacgctcgtatacctctcggagaaaaaagtggcgatcaaagaaatggctctgactgcaatccgcagtctggaaaacagcaaggaactgtacggtgaacttttgaagaaagagaagtccgacgattggaagagcttgatccaaattctgctggataccgcagatctaagtccagagtatgcccatgctgcactcgctgatcaggcggatgccaaaaagttgtcgagactgagttggttgtccttgaaagatctcccttcactgatacgtattgaagacaatcagcctttagatgaccggattaaacagtatgctttggtgcaatcattggatcatacatccggtcctaatgaaagattaaatgaattacgggattacgtgagtgaggcatcgctcgctcgttttgcaagtgaattgcttcaggtctggattcaagaaggtgcccccgcgaaagaaaagtgggtgatgtatgtttcagcactctttggtgatattcagattgtgaatattttggctccgcaaattaaggaatggacagaaaacagtcgtggcgcgattgcagcagatgctgtaaaagtgctcgcttatctgaaagaaccatccgctcttatggcgattgataaaatcaaacgtggcgtgaagaaccgtcaggtgaaaggtgctgctgaagaagcgttgcagcttgccgccgataatatgggacttacctcggaacaactcgaagatcggctggtcactacacttggttttgatgaaaaaggaaccatgcagctgagttacggagagcgttccttccttgttaaggtcaatggagacttacaagtcgttgtcttaaatgaagaaacgggcaaatccgtgaagagtctgcctgctcctgcacagaaagatgatcctgaattggcagcgcagtccaaggcacgtttcacacaactgaaaaaagatctcaaatccatggttaacattcaggcgcagcgtctggaagagtcattgtccaagcaacgtctgtggtctgccgatgagtggaaagcattgtttgtacaaaatgtaatcatgcaaaaatttgctgttggtctgatctggggaacgtatgaggatggcgctctgatcagcacgttccgttatatggaggatggcaccttcaattctgtggatgaagatgaggttgatctgccttcaggtgcgcaggtgggacttatacacccgctggaactggatcaggcgacgcttgaaggttggacaacgcagttggaggattacgagatcaagcagccattcgagcaattaaatcgtgagattcaccaaccagaagatgaggataaaacgaagaatgaatacgatcatctgcccgagtctgatttttcaccaacggctttccccaaagcactggagaaatacggttggatcaaaggaccggcacaggacggcggctggtatcatgaattttataaagagtacggagatcttgttgcagaattgcaattcagtggtacgagcatcacgtattacgagggattggatgacattaccctggaatcccttcatttcttcaaaccgaataacaagcaatattattattatggtgacaataaacccattgctctaggcaacgttccaggtcgcgtgttcagtgaaacgatctacgacattctgagagcaacggggcgttgatgacgtgagtggattcaaggaaaaattccggattttttcgaagctgtgtacggaggattatttgattcggtatgccaacaaggggttgtacaaaaggtctttgaaagagttggacaatggtgtaagtgtaacgtacacatggaatgcatcatctgtgagttgtcagctcagtgacgggacacaatgtacgcttgaaaatacgctggatcattgggaatgctcctgcccggccgatcatatctgcaagcatgtgcttattgcaattctgtatgatcaacgggaatatacggcagaggattcaatgaatgcagacgagaagcatgcgctggataaggactcagggatatcggataatgatccgttggacgtaccaaaaaacgtatcagtaacagaatcagcatcaaacttagtatcaaatgtggacgatccaagcgaaattccgcatacggtgtcacgtgagatcgagtctcgcttccgctggatgacggagtctgaacttcccgtgttaattaaatcgtatagttcttccatgattgaggaagttgttttccgactgagatacccagaggaaattaagatcattgaagattcacttcttacggttcatctgaccacccagaatatcgaggtgtcttttacggaggaaccgaaccttgcaaaagcactatgtaaggtgaagcagacagccggaaaaatggccaagcttgaagctttgttacggtaccggaactttaaaggtctggatgatatggatgcattaagtggacgggtgtacgaggccaagttctctcttcagacagtgcaggaatgtcgggttatgctggcaggattgttgaagacgggactggcccgccttcctcagtcctatatggcacaactggagacattggcaatcgctgctcatagtggcaacctgcctgacatagaacgcagtttacgagggattcaaggagaactacagttgtttttcaacagacatatacgtttctccatgcaatccatgttggatcgggtgagcaatctgtatcttgcgctccaggttcttgaagaagaaaaggtatctgtcattcagcagagtcagctcattggcagttttcgaagtaaatactatacggttccttcacttcacctgtatggactgggagctgatgcgtgggagacacgatccggtttccgtggaatcacctattatttctattgtttcgatgatgaggaaatctacacctatagcgatgtacgcgctgtatattatgatgatcagcagttctcgtatacagagcattatggtgcattcacaccatggctgcctaatctgacctttcgccagttcgtcggtgaagaagttcaattccattcagttaaagtgaatgaagaacgccggatctcttccggggaaggtgccaagcttgcgattttgccacgaacgggtgtggaaacgttgaatctgggcaaaaccatgcaagatgtaacgactgtacttcaagaggaatcgcggtcgttcgacttgtttgctgctcccaaagaacgattggctgtaatcaaagttgctcgaatcgtggaccataactttgtcaaacaaacgcaggagcttgtcctgacggttgagaataccgaaggggaaagactggcactcactctcccgtattcatctgactggcaggcgatgatcaaaagactggagtcaggatatggttcccaatcgcttgaacacttctatgcctttgtgcgtgtggaaccaaaacggattagcccaatcagtttcctgaagggcaaaacggtgctcagtctgaaactggatatcggtaatgggaggatgggcagacttggaagaatataatcagttcatgcagagaattaacggctggtcagaagagttgctcctgcgcgggttatctcagtttacgatccgagatattgaggtacttgagcagctcgcagcggaatccttgcggttgcagatgagtttcctgcatgagttgttgaatcacctcatcaaggaagggcgtagcgtggctcttggacaaggtaatgaagagttgctgttatttcagtattgtcgtctcacccaatatgtacaattgagtgtgcaagaagaggcgtaatattggttagtattccaagcgaagacccatgagagcgatatgatgtaataaacaagatgtattacaagatgtattataggataaaaaaagatttgtagaagaccacaaggtcactgcaaatctttttttatcgtggagtaagtaaaagtcatttgccaaacgaatataggtaggaagcacagattaacacgagcactcgtgatcatatgagcatggaagggagggatatataatcgtggaagaagaacaaatacggaaggcagtagcgaatcgtgatcctgaggccatggaatgggtgatgaaccactacacaggtttgttatggaagattgctcattccatcctacatcatgcatcgacagaagagattgaagaatgcgtagcagatacattttttgctttttggcagaatccggatgcattccaatctgggcgaagtagcctgaaaaattaccttgcaacaatcacaaaacataaagcgattgatcgctaccggaaacttaatcgaagaactgagcttacatatgaagaggagattcattcggtgcaaacggatgatttgttggttcagatggtcagtaaagagacatatacggaacttaatcaaatgattgaatcttttccagaaccggaacgtgagattatgaaacgtcggttttacgaaggacagagaccccatgagatatcggaagcattgtccctacacgttaggcaagtccataacaagctttatcgctccaggcaacgattgaggacatggtggatgaacaggaaataaaggaggcgatcatatgggagaatccgaaaaagaattcactgagcagaacctctttaacattaaaaagttgttctatgataaattggcgctgaatgaaccaacaaacattacaagatcagatacatcattttatccacctgtattatttccatccgatccatccgcacagacaaagaagtccatgaataaaagaaaaaggtatcgcaaagccatctatattcctgtaaccgctgcgttatcgttatgtctggttacaggggcagctgcatcagttgggatcattgatctgtctactgttcttcattttctaggtgcagatcggattggcattcttcagcctgttcaccaggtgagtgaagatcaagggattcgaatggaggttataggcgctgtcagggacggagatacaacggaaatctatgtttcattatcggatctgactgggcatcgcattgacgatacgttggatgtgtatgattacagtgtcactggaggtaatgcaaacaacgctcagattattcattatgatgatacgaataaaacggctattgtccgattcctcattcaaggaaaagtcagcaaaaatcggattaccgttcagatcaatacgctgatgtcaggtgcatctcgacaagatggttacaacgtacaagtggactggaagcagttgttacaagaaaagcaaaacaatagttatgaaatcctggagcgagatcgtataagtggcttgggaggtacaaccgatattcaattggaaactgatcctattcgggtactgcatcaggatgtaacgaatgtccccgttgagggtattgattggatgcatatttccaatataggttttgtggagggcaagttacacattcagattaatccggataatgagattggcgagtataatcatggatatttctacttcacggatgagcaaggtcaaaaactcgatatacctgaatattccgttagctatggacattatatgaaagatggggttgggtatggaggagattatgaggagtttgtgtatgatctgtctgctgttgacgaattagataagctgagacttcaaggcagctttacgagtattagtgaagttgtacaggggaattggaaaacgacctttaacttgagtcaaaatggtttgagtaaaataggaaaagttcagcttgatgcaagtggagcctcacaggcaaatataatcctttccgcagttggcgttacgcttacaggggaggcactgagtatgattcggatggaggatctgagtattgaagtgcacctgaaggatggtacaaagttgactggcgaatccggtttcctccagctggatcaggatctcattaagtggatttcccctaagaccattccggtgaatgatgtgagctacctgctaatcaatggagagaaagtaactttgtaagaagaataattaaaaggtgaatcaaaaatatggggataacagcgatcggaaggtgttctgtcatcggagtggtaagtgtgaatattctttagttcaacttatataaaatgaattacatgtcatatcccgatttatgacgcataccattaggcgaatgcggtcataagggaggaaactgagatgtccatgagcgaaccgctgttaacgcaaattgtgaatcaacatattccggctggtgcaacggtcgtcactattgataaacctgttaaacatccagcgatctatgcggcagatcttaccggtgacggtatgccggagattgctgcagtctatcagttgaatggtgagctgtatttgctcattctgaaatttgttcaaggacattggatcaagatggcactaattaagggattggggtatggggtgactttaatgactgcagcccctgtaacttcaacggcaaggaacaatcttattatcggttggcggattggttctatatggtctaagcttgccgtatatgagtggacggaatcagggctcaaagatctggcgcctgacgatctatactatagctatgcagagattatagatatgcctggtccgcatggccgagatgggaaagtggagattgcactctggatacatgacacaggtgaagcctatcgtgtggagattatccgatggcagaatgggaaatgggttcctgcaccggacgtatatgcaacctattatcccaaagtggtgcaatattacgagcaactaacccagcaatatcctgattatatcttttactggtattaccttgcggatgctcagtaccatgcgggccagtatcccgcagcactcgcttccgttcaaaaagcactcagcttcccggaagcgtacccttccagagaggcgctgttggagctagaaaagaaaattaagcaggcaatggtccctataagtcatgcccgggtagcgacatggttatatccagtctccgttcgaaccacgagtgggacgcgttgggggtacatggatgcccaaggccacattcggcttgagccggttctggatgacgcgcaagagttccaacccaatggattggctgtggttgtgaagggtggtcgtgccggcgtaattaaccttcaggggcagtatgtcgttcaacctgtatacgattccatcaattccttttccgaagaacgggcgataacaattgattctcaaggatttaagatgattaatgaacaaggtacagtcctgaccaaacgggcgtacccgtatatctcaaatatgaacgacggtcgagcgttattttacgattctaatcctggtcaggcagatggatcggtgagtcggtatggttatttggatgcgtcgggcaatgaggtgatacctgcacagttcgcttctgcgaatgattttcaagatggtaaagcggttgtgcagattaaggacaatgaatatgcactcattaatcgcaatggacatcggctcgcaacgtatccatatgcctatgtgggaccactaggggatggactgctggcttttcaaaaagaggcctcgggtaaatatgggtacatcgacgaacggggtaatattcgcattcagcccaaattttcatcggcatttgcttttagcggcgggcaagcgattgttaatacagcggaggattacaaatcgatctacggtgttattaatacgcaaggatcgtttatcattcaacccgcctataatgacatccgcgaactaggcgagcatcgttatgcgctggggcaagcaattaatccggagcagccgtatattggctctgtatacgcgattgcagataccaatggcagaagacttacggagttcctatatcgcgaagtaggcaattacaaaaacggccttgtttccgcatcggatggcagacaaacctatctgctggatctgagtggaagacctgccgctgggtatccacatgtagaaggttcgggtacgctggaggtcgtggcaccagatctgattaaggcctatgtagaccagcgtttatcgtatgtgaatcgggcaggacagatcatctggcggcaaaatacaatcgttccacttcatccaccgtaccgtgtacgcgaagagaagtacaaaccaaacagggactacctcgtatattatccgcaggtggagggattaacgaaccaagcggagcaaattgcgctgaatgccaagttgaagcaactctctcaggttaaaccgatccctgcggatcagcagctggattacacgtatacaggtgattttgatataacgttttatcagcagcaattgctacaactgcaactcacaggttataactacccggcgggtgcagcgcatggtatgcctacgatgatctatgcgatcattaatctgacgaatggtcagttttatgagttgaaggatttatttaaaccgaatagtgactatgtaaaagtgttgagccagattgtgggggatcagatcaaaaatgatcctcaatactcgtatgtgtttccggacacctatacggggattagtgcggatcagccgttttttgtcacagcggatgctctgcatctctacttcaatccatatgacatcgctccctatgcagcaggatttccaacgtttacgattccatttacccagatcaaggatatcattaatacagaaggttcgttctggaaatcttttcatagttgagtgtccattcacaggttaagcgatgaagccatatatccaatatggcttccttttgaatgcaataggcgacagtttaatgatgtaagtaactccttcacatatttatccatacgaaatggaaaatattacgggagttacagatcaaagaagtcatatttatctatacaagcaaaaaacgaaaactttctccaacaacaattttttgcttgcaagaatgtaaatacttcaccagtcattctcaagttacgcgacgaggtcatatgtccaatagggcttataagatgctgtgagacaacaataatccgtgatgaggtattattgctccgtgaagaggtagtgatcattcagggctctatgagatattaatgtgcgtatatagcactgcgctatattgagaatgattattaatatcaggagggatgagatgaacaacacatctgaagtgtccgggttaatgcaagtgacgaaggagcgcaaaggtctgctgatcacagcaagtatcttctcgaccctgtcgagtctgttgcagattgttccttttgtcggagtgtataagatcgtcgaggaactgctaacgcatgcgggccaaccatctgcgatggacagagatctgttgatctattgggggatcgtcgcgttcgtagccctgattgcagggcttgttgcgctctatatcggggggatgtgctcacacattgctgcgttcaatattttgtaccagctcagagtgggacttgcggaacatgttgccaaagtaccaatggggtatcacacccggacggcaaccggtgagctcaagaagatcatcgaagtcagtgtggagaaaattgagaagtttatcgcccatcagttgccggatctggtgagtgcgatcgttattccgttaatgctgctgggttacttgttctggcttgattatcggatggcgctggcgctgttggttccaatcggaatcgggttctggctccaaagtcgcctcttccgcagcgaaaaaggccgtcaggcttatcgtgattttcagcttgccattgaagaaatgaatgcgacgggtgttgaatacgtgagaggtatgccggcggtgaaagtatttggcattacagctgattcgtttctaacgtttaaacaggcggtgacgcggtaccgggatatttcgttgaaaataacagatttgtgtaaaacatcctacgggctgttttttgtaatcatgatttcattatttaccttcattgttccagtgggtattctgctatcgagtggaaatgcggggaatcagtcgtttgcgatcacgtttattctgtttctgatcattaccccgagcctatctgcaccgttattgaagttaatgtatctgggtagtgggatgcgagagattgtggaaggacagaaacggattgaatcggtgtttgccgagccaattgtacaagaacctgagttgcctaaagttccggatacatatgaggttgcctttcgtcaggtatcttttgcttatgaacgtaaggagagcaaagcatataaacccgtacttgatcaggttgattttgtagccaacgcaggagagatgaccgcacttgtcggaccttctggtggaggaaagtcaaccatagcgaatctattgcttcgtttctgggatgtacaggaaggtgagattacgattggtggaattccgattcaggagatgggtacggagaaactgatggataccgtgtcctttgtatttcaggatgtacatctgttctacgatacaattgaagaaaatattcggatgggcaatacatcagcttcacgacaggacgttatagttgcggctcaaactgcttgctgtcatgaattcattgagaaactggatgccggatatgacacccaaatcggagaaggcggtacgtatctatctggcggtgaagcacagcgaattgcaattgcacgagcactgcttaaaaatgctcccattctggtcttggatgaagcgacggcctacgcggatgcagagaatgaacacaagatccagcaaggtctggcccaattggttcaaggcaaaacggtactgattattgctcatcgtctaacaacgattcgtgcagcagagcaaattcttgtgatccggcaagggacaattgctgagcgtgggacacatgatcaattgcgtgcattaggcggagtatatgagcacatgtggcaggcccatatcagtgcggcttcctggaagcttggaggtgcaggacgatgaagaattatttatacaatatatctgggggtaacccgcgtagtctgctaccttcggtaattgcagcgattctggacgggattgcgaagatcgttcctgcggcgctgcttgtagacatattcaatacgatatataaatctttcgctgaaccagacaaaggactggatattaatcgtatgtggattgtatgctgcatcctgtttgcctggcttctggtggaatatgcagcgtacgcttcactctatgacaagacctatcgggcagcatacagccttgcggcttcaggacggttgaaactggccgaacacattcgccatctgtcactaggatttttcggaaaacgtgatcctggcgatctgacgaatctgatcctgagtgattatggtcaggtcgagcatacgatctctcacaatctgtcgcagctgatcagcgcgattgtgcttccggtactcgcttttggcggacttctgttggtggattggagaatggccgtagccatgtttgttgcggttcccttaggtgtggctctgttatggcttacggattccattcaggcacgactgagtgagaaccatgttcgagccaaaaacgaagccgccagtcggctgcaggagtatctgagcggtattcatgagattaaggcccacaatatggggggcaaacgttttgaacggctgcgtcgttcttttgacgaattgaaatcagcttccattcggttggaaggcattatgggaccgatgatcatgggcgcgatgttgcttgcacgatcagggatgacatggatgattctagtgggcagttatttgcttgctggtggtgagttgtccctaccggtatttctgttatttttgctggtaggtacaaaggtattcgaaccgttaacggttgtactgatgagttatggggagatgcggtactccgcgtatagtgcaagacgcattatggatgtgcagcaggaagcaccgatggcaggaacggaagatgtacagcccaatcaggcgatttcattcgaccgggtgacctttggatatgatgaccagcatccggtcttgaaagacttgtcctttacgattgagccgcatagcattactgcgctggttggcccatccggtagtggtaaaagtacagtcacacgtctcattgcccgcttctgggatgtacagcaaggcaccattcgcattggtggcaaacccgttgatcagatggaccccgagaagctgttgcaggatatctcagtggtcttccaggacgtatatctgtttcaggatacgattggcaacaacattcgtgtaggaaagaaagacgcttcgcaattcgagattgaggaagcagcacgcagagcttgttgtcatgagtttatctccagtctgcctcaagggtacgatacgctcgttggcgagggtggatcgacgttatctggtggggagaagcaacgtatctccattgcacgtgctttgttgaaaaatgcatcgatcgtcttgctcgacgaagccaccgcttcacttgatccggagaacgaagccgcggtgcagcaagcgattaatgagctagtcgcggacaagacggttattttgattgcacaccgattaaagaccattcagaatgccgatcagatccttgttttggaccaaggtcagctcgtagagcaaggaactcatgcgcatttgttagatcactcaggcatctacgctcggttgtggcaattacaacaggatgcagaaggctggcaggtaaaagtaaacgtataataatgagttcgatgagatagataaagtaactgaagcaaacaagcctcatgtggctaatgaactgacataaaaggagaatgacaacgatgtttaaacgaattcctgtatggattgcactatgctgtatgctcacgttggcggcctgtggagcgacccagacgaccagtgaagtggtcagctcctcagagggaactgcacaagcaacgaccaaattgattaccaacccgaatggagaagagattacgatccctttgaatccagagcgcattgttgatctgtccggctctacagaagagctactgatcattgggaaaacacctgttgcaacgatgagtgcggattacggtaacccggaggaactcacgccaaccattaaggatcagctgagtgcagataccgttaatctgggctggtatggtttccccttcagcattgaagctatagcgggtgccaatccggatctgattattctgggaaaggattttaacacggatcaatatgaaactttatctaaaattgcacctacaattgcattgccttactcttactatgattggagagaacgtctgacattcttggcagatacgtttggagaagaaagcaagaaagatgaatatctggccaagtatgatgcgaaatctgcagagtggaaacaaaagctggaggcggctgtacatggtgaatccttcgccgtaattgagacatatccaaacaacctggtcatctattccaataaaggggccgctgagatgttatacggcgaatggggcctgaagcgcacagacggtatccctgatcctgagggctggggaggcaaagagatcgctctagaggctctagttaccgttaatccggatcgtctgctgctgatggagaatagtgagaacaagatggtcgatagtaaggtgtggaataacatgaacgcagtgaagaatgacaagatctataaaatctccaatgtcgataattacaattattcgtacacagcgatggggagaatggagcttatggaccgtttgggtacgatgattctggaaggtcagaagtagtcattgagttagagccattgaaacgatagattaaatttaacatttaacagaacctaataacgcctatgtgtaattgtgtaatttgttcgaaatcatgtaacttgagcggttctggctgcgtttagacattggggtgatctgatgttggtgaacgcggttcaacggtacatggtattaggactgatatttatagggataagcttgacggcatatctcgttcttgaaaggattgaagggtaccacattacaacgacagagtattacggcttacgcaatacagggggagtaatatatattctttcactcatcctgggattcggtcactatttagtcgctttttatgttgttattcttagccctatctcatggctactgcggaaatatgtatgcttacctatggtgagaactttcatctatatgattgggtttggatggggagggctgtgggtttttgatctcatgtacaatccatatttcgtgaatggataccatctgaaccgaatgacatcgatatggatatttgccatcgctggtttagtctatgctattttagagaataagatttggcgaagagggcagatacagaacgaacagaaggctacttgacaaatgttgagtagctttcttggtttacataattattatggtgttttcattaggggctcagaagccaaatacaatatttagaaaggattatgtgtaaatagtgaacatgtacagcagtaagttaattcgatagtttgttataaaattcacaaagaatgccagtgagaagaactaggagttttatcgtaaaaaggtaaaattttctgttatactatttgagttgtgtacataaagttagatattttaatgaagggagttcatgaagtaaattagccgtttagtttaaaattgtagtttggaggaaagcattttgtataaagcgggtttttggattagattaggagcaggtgtgttggatagtcttattatttcaattccgttagtgattattgcaggtgtgctgacgggtaactttgatacggatgagccgattgccaaactgcttagtgcgttatactcaattttattaccagtttactggtatggtcgaaccataggcaaacgtatatgtggaattcgaatccgccaatacgatacacacgaaccgccaaaaattggtacgatgctgatgcgagttgttgtagctggacttgtgtacgtattaactttgggtatcggagttattgtgagtgcttttatggtcggtttgcgtgaggatcgacgtgcgattcatgactttgtagcaggaacagaagtagtttgggattaactcgaagattataaagaattgctgtacaggggtaaaaatcactgtgcagcttttaaatcattattactgtttcacaaaactcgtattttgtacatatgtatataggcctttcttatatataagtagtgccatgatcccgtcaggctcttcgccacgtctttcccgcattaattgataaagccggttgaactgaattacttcttgtgccgtcgagacatatggggtccaataactaagccaccgctttgccaatacgggttcaacaatatcgaagaatagaaatctctggtagtccttattaaaaccaggtaacgaattaccttgtatctcattgatatccagtaatggttcttccagcccgtctaccatttataccaacctccctcctacggtttctcagtattcctagtgtttcatctcccatatccgactcagctatcatttgggaagtcataccctgattagtacacgtttgggccactggcttctccacccaggcgggaatatgagccgatcaatctgacaaaaaggtgctcagcaatttgcccaccgaattcaataggtctgcctccaatctcaatatcaccaacaaggaactctttgttcaaaggcacctcatacacagctcttaccgcaaaccctggaccaccacgcactacctttccaataatctagtggatcgctgttgtcaggtgaagtccaactacttgtgttcggctcagacatgtagagcccgacaggattcttcagagtaatcagtgcaccctgtcgtgccagtgcattaacttcgccaccgatcaggggggcacttgcccgcttctcaattctatatttagcacaacgtattagttcattctgatcgctaattatcgctccttcaccatttttccgaagtatggtcgcatcagctgccaagttaatctcagcacttaatgtattagcagggtgcgtcagatgcattgctccatgactcgtattccatttattcaaaggatcatattggccttctgggaacagatcatcgtgctgtacattaggagaaacatattggcggtataattcaagaactttctgtttatcaccaagagcgttaattctccaattcatagatgaaaatgggtgtccatgcgccattgcctgccaatattctggaccctcgcacgtaaatgtcactcttttaattttattactttcttcgtcgtattccacaaaccattccaaacagcagaagtggatacttcattgatgtattcactccatgcctcaagctgatttaaaatattgttatagtcatccaaattacctggcggatcaaagctagcaagaaccatataaaatgcttcctttcctcaaagatggcttaagccttagcaatccacagactactttaaaattgcgctgtagcaagatcttgatgctgatgaagtgaagaaaatactgaatgatccagcggcaattgccgaggcacacgcagagtttgcccaagtacaccgccttggagtaaacagctacccgacacttcttctccgttatggaaatgagtttatttcattaggcgcgacgatgaatatagaggaacttgaagagcgtctagctagtacagttattgcgaagcaaactaaaggggatcaatgtacactgggtaataaagaaggctgttggtttgaattaagcaaaaagggatctatgatattggatgaccccctatccgttattctaaataggcaggatataggcaatgttaagtcatcatgaccacccgttcaccgagtggtcatgaaggtttctttatgttatacatcatgggaaaatcatagttattggtaaattttatgtccctcctgctgttctgcaaagtaaagttccatcggtgtgattgcatgattttgtctgaatttattcttgtacgtttcaaaattccaactttccagaaatttcgttgctgtaacatgtcctgattgcagtaagaaacgctggtcttcatccgtcaaattgaacttcgtcgttgttacttttccagtaggaataaacatcgttcgttcttccgtatgttcatctacatgtctttgatcgtgggcctgtaacatcgttttgaatattcctttgagtaaagaaaccggaccgttgatatccatagattgggcatacgtacgcttttctgacagccggaagccaaaggtcggccactgtggaatcccctccacatcaaagagccagatcggaaagttactgagcatgcctccatccagcatataatacggtttcttctgtaatggcgtatgccatagataaggtttaaaaaagaaaggcagtgttgtgctcattcgcacagctgcagcaattggaaattcagatgctttcagtccgtaatgaggcaaatcattaggaaaaacgacgatcttaccattacttatattcgaggcgataatggaaagctttccttctggaagatctccaaacgttacaatgttcttacgtttcagccaatctgtcatcacttgctctaatgtgattgctatagattccagagtcaaatatgaatggaagggtcttgttaaacagaggcaacctgcttattcctgtccgtccgagcagcttagtataatctagcgagctcatcaaattccgaatttcagcactgttgtaaccgcaggctaacaatgtcgcaacaatcgctccagctgaagtacctgcaattttgttccaagtatagcctctagactccatcacctctatggctcccacaaaagcaattcccttgacccccccgccttcaaagactgcatctgccttcacctgaatttcctccttacaaaatgaaatatttcctggttattattagctttgtaaattaaactattcacgttgaggatatgtttgttatgcttgcttcccccttcaatcggttaacccttgtgccgagcgatccgctcaattcctccccaacggcttcaaacagctgtgatggcagacataccctcaagcgtataaggaattttcgggcgttgtcctgacataagtgttctggcgagggcttaaaaatccagtgtaatccatactgccgtcctcatcacatttcttacggaactgagggtgtgatggctaaaataggtagataagtttgtgtcccgattaaaaaaaaattaccctgtatccttttgccaccagcatctcacaaaatggaacagtccatcggatcatttgtgttcccagcccggcaatcagcagaatggtttcatgcttttcatcgctataactgtcataagcaagatcaataccgttaacgtttaacatatggtcatataaggcagcatgcagcacggtattaccaaaccgccatagtaactcgttcattaggaacatcagtaaatgacatttgtaaatcctgactcacaagacaaaacgccgaacatctcgaaagctcctctttgttctatccagtaatctatctcgacatctcctcttattgagatatgaaaggacattcgaggataggcttttaaggaaacgcctttatcgcgcgcagatatcggcatagtcccaaggagattcttaaacgccggtgcgaacgcttccggcgattggtatccatatttcatagcaacatcgattaccctcgcatcgtttgcctgcagttcaaaagccgctaatgtcaaacgacgacgtcggatgtgctcggataacgtgattcctttaatgaaagggaacattcgttgaaaatgataggtagagcaacaagctatctgcgctatttcatcatatgagatattgttctccaaatttgtttcgatattatcgattgaacttttcatcctctccaaccaatccatcgttctccctcccttcgagttaaatactatcgtaaataaaaaactttccttgcatttcctgcaccaaattgtcagcatcgttcgcatcccctgaagaccaatcccaacaaatcttgtctaattaatttctcctaagaacatgttcttgtccaatacggcaatcggtacaagttcttgtccttggctcgggacaagaacaatgttccattgccttcctcttcttatctttttgcgacaaccaagagccgttaatcatcattgcactgattaacggctctgtaaatttaatctcttcacatatgcttcaactgatttttgtaatactttcttttaatcatcctggatgcttcttctgatcagcatcgcaacagattgaggtgtataaaatattacgtttgggctttcatgttgatatgggcaaacgtatttgtcagccaacacttcttcattttctaaatagtgatattcgatggaacttgatgagttccggatacaaatagttaatcaagcgaggtcttatattaatgtggcttttatctcgcaatagaagatccatcataatactatttaggtgactgtctaatccaaaatgacacaatgctcatttcctcagcttggaacaagaacttgggttccttaaatcaaaaaagctgctataatagcgactttgaatggaacaatgtttttgtcctccgacattgatctgaggacattgaattatacatctcaaagtcttttggagttaaaagaagaccacatatagagattctcttatgtggcctgccttgtttcccctcaagtatttatttagcacacatacttgaaatgtttttgtcatactgcttcattaaattaacacgcgaatacaattaatcaaggaaataccctgccccattattagcaataatgtctttgtaccaatgaaaacttttctttctgattcttcgaagcgtgccagagccatcgttgtttttgtcgacataaatgaacccataccgttttttcatctcgccggtaccgttactcacaagatcgatcggtccccaacttgtataccctataatatcaactccgtcttttattgcttcagcaatctctgcaaagtgaagatctaaatacttaatgcggtaatcatcttcaacggtatcattatccagaagagtatctttcgcaccaagtccgttctctacgataaataatggtttattgtacctctcatgtaactggttacaagtaatccgcatgccctttggatcaattgtccatccccattctgaggtttccaaataagggttgattacagaaccaaacacattcccatctgtgtaattcttcagtatttcaggatcagcactggtacaacggctcgaataatagctaaaaccaatgtaatccactgtatatttcttcaaaatttccaaatctccaggctcaaactgaagttgaattccattctcgatgaaaaagcgttttgcatatccgggatactcccctttagattgtacatcaatcaagaggtaggactctcgttccatttccataacttcccagtaatcttctggattactactgtatggatacacatttccagctgccaacatacatccgattatggcgttaggaataatttcatgacaagccttaaccgccagagcacttgcaaccagttcatgatgcgctgcttgatacagaacttgttgtttattctctccttcttcaaaaataatgccagctcctgtataaggcagatgcaacaacatattaatctcgttaaatgtcatccagtatttcactttggttttatagcgttcaaacaatgttttggagtatttttcaaatagctcaatcataattcggtttttccaaccgccatacgttttcgccaagttcacaggtaaatcgaaatgacatatagtaacgacaggctcaatattatacttcagaagttcatcaaacacgtcatcatagaattgcaatcctgcttcattcgggattacatcgccaccattgggaaagatgcgagcccatgaaatcgacattcgaaacgatttgaagcccatttccgcaaaaagagcgatatcctctttataacgatgataaaaatcgatagcttcgtgtgaaggataaatctcgccttcctcgggttcaaacgaatttaagttacccatcgaaacctgatcacgtttaggccccttcggcatcagatcaatggtcgttagtcccttaccattagctaggtatgccccctcaatttgattggcagccgtagcaccaccccacagaaaaccatccggaaatttattgattttattaaacatatccaattacctccctatttttgtgcatatactttgagtaacggttctttttcatctaccctgtcatttgcaattcctacaatgtcgtgatacatggacgtatttgtaataacaatgggggttaccatttcataacctgcatcctggatcgccagcaagtcgaactctacaatgacatccccaaccttaacccgatccccatctttcacgaatgaattgaagtgctgaccttttaactgaacggtatcttgtccaatatgaatgagtatttctactccatcatcactgataaggccaatagcatgtttcgtacggtaaatcgtttgtacaatgccgtttactggagatacaacacgtcccgttgtagggaggatggctatccctttgcccatatactctcctgcgaaagtttcgtccttaatatcttggagtctaactacagtacctgtcatcggactaacgatttcaaagggttggtcatttaatagacttgtattaggaacgaattcttgtttttcagcaatattggttgatatcgtctctgttggatctttaaaaccaataaagtaggttaagacaaacccaaaaataaaggcgacggcagttgcaatgagtgacatataaaaactgaaatcaataccggctaccttatttacaaagttaggatagccgaacacaccgaggcctccaagaatgtaaaattttgacccagcataccccaaaagacctccaccgatacctccggcaatacaactcataatgaatggtcttcttaagggtaaagttaaaccatatatagcaggctccgtgacgccaaaaatcccagaaatgaatgctggtacactcaatgcttttattttttgatttttagttttgatcagaaccgctagaaccacaccgatttgcgcaaatgaagctccaaaagaaagcgccataattggatctgatccaagtgttccaatattcagcaacgcgatggggatgattccccaatgaagtccaaaaataaccaaaacctgccacatggagcctattattatacccgttaaaatagggctaaatccgtaaatttcagtagcgcccgctccaattaaatttcctgcccatgtagatatgggccctattaccaaaaaagtagcagggacaatgataagcatcgtaaaaaagggaaccaagaacgttcgtaccacttgtggtgtagctctttttagaaccttttctaatttagatgcagagaacgaagctaaaatgatgggtatgactgaggaggaatacgtcattaaaataacaggcagacccaaaaacgtaatatgaattggagattcaaaaattgtccctccaaacaaaatgtattgagggtccccttcacttaaattcgataacgttgggtaaacgagtgatgcccctatagccattcctataaaggacgacccaccaaattttttcattgcagtgtaccctaaaaatacggggaagaagtaaaacaagcaatctccagttgcttttaacaattgatatgttccagatgtttccgtaatccatccaaaagataaaaacagttcgttgaaccctttaatcattcctgtcgcagccaacaaaccaagtaatggttgaaaaacacctgaaatcatatcaataaaacgattgaaaatatttcctttggctgttttattttcatcggaacttaaagtctcttcaccctctacagaccaatttccaagtttagtgatggccttatatacatccggaacttcattccctatcacaacttggtattgaccgccactttgcatgaccgtaatgaccccagacagtttctttaattcttctgtttgggccattccttcgtcccttaattgaaatcgcaatcgtgttatacaatgaacaacgctgttaacgttttcaacaccgccaactcgagacaaaatctccttggccaactgatcataattcatgagtgctcttcctctctggctgtgactttgcatcaaaaaaactgtatggctgtccagtggatagactctaaacatcatttccatgctgaagttcagcgttctgtttttttgcacaacgacgctcaattctgcaaggctattttagtaatttcaaatttgtcaacagccttcaaattttgtgaaaagttagcaaaaagtacgtcttttctggccagaaatggtattgcctgattgaacagtcacaacccagttgatgtacaagctctctttgcggacaataataaaacacttttttcaaaaaatgcaagtgtttttttactaggacttgacttataaaaaggtattcacatgaccatacttacatttcatatatgaaagaaaatttagttcacatattccatatgaattttagaatatttgctatacaagcacattactatgtactcaactgttactgaaggtgtaggtttccttttgacttttatcctcattctctgtcacaggttattgacaagaacaaacctttgcttttatactgataccgaaatgaacgaaatactaaaacccgatggatgtggatttttctagagagtgatctctattttcgccacacgaatgcctatgcgcatttgtgtggtttttttgtatgcaaaaaaggaggaatatttatgaaattatggcattatgcacttattgtatttttgggaggctgttgttacggcatactttccacatttgttaaactggcttattacgctggcttttcaacaccagaagtcactggcgcacaatatttctttggtgcagttttaagttggatatttgtgatctttgtcaaaaagagaagccttactctcaagcaaattacaaaacttctattatccggaatcccctttggactgacaggtatgttttattatcaatcactacagagcataaatgcttctctagctattgtcttactatttcagtttgtttggattggaacattatacgaatgggtccttcagaagaaaaaacctaccgggggcaaactaatctcgattggtgtactgcttttcggttccgtactagcggctaacgtcttttctcaaggaaatctctcgttatcgtggcaaggaacaatttggggactactggctgcttcaactttcgctttatttattttcctcagtggttctgttgcgaaagatacttcgcccgtattgaaaagcgcccttctttcaactggagctgttattactgtctttgtggttttccctccaaccttcttattcaacctggatgtgctggcaggattgagtccatatggattagttctcggagtttttggcgttgtattgcctccacttctgtactccataggtatgccccatatcggttcaggaatgggtacaattatgaccgcatctgaattacccatggccgttataatgtcttctcttgtactaggagaatttgtaggttggtctcaatggcttggagtgattattattttatgcggtatctcatttagtagcataagacaaagaggattaagaccacaatcttctatgaaggaatatacatctctttagacttagagatgtaaggagaaagctatttgtgaattctatcgttacacatatagcaataatccaaaaatttccgaacaagacttggagcatttccaagggctgtttggaacttgcgcagttgaactagtaaacgaagatgaaccgtttgtggttcccttctagcgatcaacaaggtaatatgtggaagaataatttattcttgtttctgggggtgatcctacccatcatcgagaatttgttatgatagctgctaagtataggataccagaggagcgcgcactagcattgtatatacttctaaggaacattgcccggttgcaactcctcatgtttgttttgtatatgcgagttgttctgctcaaatagtttaatggctgacagattaaacgtgcttcagcgcctatctacaatttgtacattaaggagatcattttcaatgtacagattgatgttcttgtacctaagttatctgaccaaatcaaaacactacatgtttaactgcactaacgaacaaatgagagtagatctataatagaagaaaaaaatttgaatcttgtccaacaatcactgatgttggcatcattctttataaagaatggtcattaaattgtttgcaaaaaagtactaattcttatttagaatagataactttctttttatatttgaagatgttttaaaagaaaccttatctgcgaatatatattgattgcggttccagtttttcgtatcgccatagttacactatcctgagcgatagatgcatgaattagctagggaaaaccgattaggtattttcctaatcgttccatattcttatccctcgacaactcttgttccattttgggaccagaatacagggttatttcagattagattttgaacataagtaaaagggtttcgttttaggagctcgtatacccgtaacccttataaatttcatggctccaagtttcttttgacaagaactttataactatactcacctttgacagcgtcatttttttcagcaatggaactgagttcttggtttcagaaagcgaattgtgcttttgtctcgccataagttctgtcatgatactatttagatattcatctaatcagtaatcggactatgttcttgtccctcgacatttttctgtttccctttcttcgagagtttaatttaatattgaaagcagctagtttggattgcctaacgggctagcgacttgcattggcaatatttactgattcgagatttagaccatccaaacactagccggaacctgcctgctattcgtagcgaacccccaattaatgaaagtcgagaaacggtacaagcaaaaatacaccccctagaatttcatcggctaaactcaggggtttaatccaatgtctattctaaggggtgcacttcattttcgaatgatgaaactaaattcttcatctttttcttgcgacattcttgatctctaaagctggcgtttttttgtttagcgcgcttcatgcattcgttgtagtagcttctcccctcccattttatatgtagcatcaatgtttaattgtctattccatcaaatctgttactgcacctcttgaagcagaggaaactaatttagcatatttggcaagtacaccggatttcactttcagtggcggttgtacccaaacttgcgctcgagcggccaactcttcttctggcacttcaaccttaatttcctgaatgtcgctatcgatggtgataatatctccattttggagcaaagagatcggtccacctacttgtgcctcaggggatacatggccgactacaaatccatgcgagccacccgagaacctaccatctgttatgagagcaactttcccaccgagacctttccctacaatgagtgctgtaacggaaagcatctcaggcatacctggtccacccttcggtccacaatagcgtatgaccaatacgtccccttcttgaatttcatcattcatgatcgcttctgtcgcttcatcttcgctatcgtacacctttgtcggcccggaaaactgttgtatcttcatgcctgacattttggcaacagcgccttcaggagctaggtttcctcgaagcacaaccagtggtccatttggtttaagcggattattgagtggacgtataatctcttgatcattctgaagtggagcagcttccgctaaattctccgccaacgttttaccagttacggtgaggcaatccccatgaagtaatccctcagcgagcaatagcttcattaccccggaaacaccaccaatatcattcaaatcctgcatgacatactgaccacttggcttcagatctgccaaatgaggaacacgcaagcgaattcgttcaaaatcatccaaggttaaatccacttctacggagtgcgcaatagctagcagatggagaaatgcgttggttgatccccctagagccataacaacggtgatcgcattctcaaatgctttcttcgtcataatgtctcttgggtagatttcctgttcaagaagtgagatgacctgcttaccggctgcttcgcattccaatgctttatccgctgagatagctgatgtcgaagaagaaccaggcaaacacatacccattgcttctgcagctgcggccatcgtattagcggtatacatccccccacaagcccctggacctggacaaacactgcattcgaccttatgcaattgttcatctgttatttttccatcttgatattgcccaacggcttcaaaagctgaaacgatatccacttttttaccgtcgagattaccaggttgaatggttcctccatatacataaacagaaggaatattcatccgtccaatagccatcaaacatgcaggcgtattcttgtcacacccaccgattgcaacaacgccgtcaaaacgctcggctccggtcacaatttcaatcgaatcagctatagcttcccgacttggtagcgagaacaacatcccgccatgccccatcgagatcccatcagaaacggtaatcgtattaaaaattagtggagcaccgccgttattacgtgcgcccagcttagcttgcaccgctaaatcattgatgtgcatattacacggtgttacttcactccacgtacttgctattccgatcattggctttttaaaatcctcatcttgaaatccaactgcacgcagcatcgctctgttcggtacccggttagcaccttcactgattaccttgcttcgaatgcgaagatcttttttattttccatgtttcttccctcatttcaaagtatttcgttcagttcctgcatcggtcgaataaaattttgtttcattaaattatgggcatcgttgctatttttgccttcaaaagctttaataatctgatcatgttcttcaactgaagctagtgtagccgtaataggttgttttaaaaatacgtatttaaatcgcctaatgtgaatctgaagagatgtattaaatgtagttacataaggattatctgagagctccacaatataattatgaaattgctcatccacctccatagcctgataaacttgtccatttttaatagaacttgcgaattccaaatttatggatcttagtttctcgatctgttctggaacaatagtttgggcggtgatttcagcagctaaggcctgaagagcagccatcgttgaatacatcttgaaaatatcgtttttctcaatattcgttacttttgtttcttttcctggatgcatggacacgaggccttgaacttcgagtaactgaaatgcctcccgaatcggtgtccggctgactccaagcgattcagccatttccgcatcaataagcttttcacctggttgcagtgttccatcaatgatccatcgctgaatctgagaaaacgctctttcttttgcggtcatacggactggtaaggaaaaatctttaggaattggcattgttttcatcctcattacaattattcttatatgcaatatatcgcatacacgatcgagaagcaattattatttcatttacgcgctcaattaagtttatccagataactacctgtttttattgagagtctgagacaaaaaaaagaactataatttaagagtctttctttgagaaatgttacataagtaatatattttaatgtgaattttcttatataaaattatttggtactaatgagggcttatgtactttttacttaagtacacatctaatcggcaatcggacgatgttcttgtccattacggtaatcggtacatgttcttgtccctcgacatgagtttgtagttttaactcccacccctccgtcgtataatctacctaaaacgccgaactcatattccgagttcggcgtttttaaaattcaatggacacaattaatatgatagaacgttgtgttaaacgtctatttttaaaatgctgttctacgtccgcaggcttttgaatgccttccaacccttagtttcgggctagatgtttttgtttgtcagtaaaaagtattttcgtataacttccccgtatgcgcatcaagcacttcgggcgtccgctcgtgctcgctaccaatcattcgatacactagttcgtacggggcctcttccgccctagtattgtgcatccgttcccattgcagacgcagcttggcctgtgccgtccatcggaggatggctgtctggtaatcaaatgaaggcacggtctccagcttctttaactgttctggccttatggagggggacatcaaacttttgaccctcccattagagcggtcaacagctagttgatagcattcatccctgacagatatgtcttgaacatatacaccaaaacgaatgatttccaaacgatcttcgtcgtcggtctcttcagttagaagcttgagatacggcaacatttcagctgctagtcctcggacatagtccatagctacttctatacatgcgtctcgatcccaggttaatggagctagttgatctggcttaccatgcgaaacaaagtcaatcagttgtccggattggctgtctactcgcgccttgactgctccctccatctgatcagcccaataggccttccaagaccggtcattcttggctggacgctcttcattctgttgcttccataccatcaacttggtgttcgagccaatattgtcgtcttgtactaactgaaattggtcgttgtttacgccaatccactcttctaggcttcgtgcgggcgggaactcacctggccactcgtccagagttcttgggtcagaggggacagcttctgccctataggctgtcggaacttcctcctgtgatgatgcagtatagattagccctctacttcggggggcgtaaacaagatggacctgatcgtcaccatccgtgtacacggctttgtccaatacgcaatattccacatgtagcaaaaaattcgccttcatacacgccatctgttcctcttctggtgtgatcatggttgggagtgctggccctggaacggttccatagtacctaaatccgaccacgcgaccgctgggatgaaccataatcaggcatcccgtctcaggaagcggcagccccatcgccttctgctgtcgtgtgtacacaaacatcccttccatccactccatctcacaatacggaaaatcacgcagtgcgccgggataatgatcttccaggaattgctctgcctgctgtttgagctcctcctcagatatccgtgtctcgttgtccaatgaggcccaggaaatggcatagtctagcaagttgccgcccctggagagcgtggcagaaacggcgtcatcactccccgttttaacccataagaatcccgcttctcccttccctgtttccctcctggtgttctcttgatagtcattgacgatcagatcataatccggtgaaacggcaaactggtgctctgcctgttgtcttaactgcaggcgtaatgtatccaggtctcgttcgagaaaatcttgagccatttcgttgcgcaaatgttccagccccttccgtaattgtgtttttacagtacctaatggcatatccagaagatgggcgatttgctgctgggtcaggtccttcttatattttaagaacaggagctgacgcagcttcggattcagactggccaatgcacgctccagatccagggtttgatccatatcattaacgaccactggctcttgcgcctgcgggtcttcgctcaggtgaacacgcttggatttcttcaaatgattgagcgctcggttcaccacaattctggtaagccagctctcaaacgcttcggcttgctgcagcgtttgcagtgactcataagccttaaccagggcatcctgaacgatatcctccgcatctttggactcccgtacataatggcgagccactcggtgcagcttatccgttcgatcctttataagagatacgaaggcatcgtgatctccgttttgtgcggcgttgatttgttgctgtgcatcgatcattgtcgttcacctcctgttatatagacagctaactcgggggtttggatttaattaatgtaacattattcttatagttgttcccaaataagtgcatatgctgattatttagatatacatctaatcggcaatcggtacaagttcttatccttagcttgggacaagaacttgtaccgataaaataaaaaagccgctaaaatagcgacttcaatgggaatatgttcttgtccctcgacaactcgcctcaatttctttagacaatacatttgtttgttcccctagatatttcaactcgttagtcagaactgttgcatcgtcgcctaaccgagccataacggatacacttacaacatttcgaacatcaacatcattacttaaagccaattgttcgataaaacccaaaattatcacaagtattttttcctcacttttggttaattcatggttaatttaagtgtgaacaatatttttataatctaacgttatctctttcctctttaagcaaggttagtcccactcaactcttcgacgtatttgttaaactatcctgcccttatgatacggttcggcgtattatctgtagagcgaaagcgaaggcaccctactgggtgccttcgatgttcttactgtctctctttggcaagttggataaacgaactcaaatccatcaaccaaccttgttgggacactcgttcattgtaaagaacgtgcaagtgctgcaacagaaccgcggaaatcgggtctgccgtcagccgtccacaaaagcgctgtcacaaatgtatggcgattcggatcgtacagcggatctcctataatgttcttgtacgttcttgcgtgaaacacaaatagcgtctcttcgtcgtcctctgacaccgtgaaggaattatgaccgggaccatacattgagatgctctcatctgtcgagagaaccgctgtttgcgacttgcgccatgaggtggcatcgagcaaatcagcatccgcatcggcttcaagtaggcccatgcaataattgaaatcggtggcgctagccgagtaagagaggaatacccgattacccttgcgaagaaatgccgcgccttcgttcactttataaccaatgatctcccagtcatattccggcatcgaaatcatcgtttgcgacccagtcaacgtccacggattgctcattttagatatatacagattagagttaccttcaatattcggatccttttgtgcccatacgtaataacggcttccattatgctcaaaggtagtggcatcgagggcgaagctttcccactcggtacgaacctgccctctttccgtccaaatgccttcgagcggattggcattttcattctctagcacgtacatccgatggtcgaacaagccttcattcgtttccgtcgtgtgtgcggcagcgaaatacacgtaccatttgttatcaataaaatgcagttctggtgcccaaatattagcactaaggataccagtctctcgctttctccagatcactacaggagttgatgtaacaagcttctcaaggttctgggctctacggatttcaatccgatcatactccggaacggatgctacgaagtaataataaccatccgaatgtctgtaaataaaaggatcagctctctgttcaattaatggttgaatgtcgtgtgacgctcgttgttggatttccatcttatcacctgtttcatcataatatagattaccctttaacagcgcctgcagtcataccgtctatgaaatatttctgaaaagcaatgaatagtatgaaaattggaatgatggagaagaaggagcccacgatcaataagtcatagttattgccataaggagttaacaacgttttcaaaccgattggaagtgtatatttactctgatctccgagcaccatgaatggccacaatagattattccagctattcataccattcaatatggccattgctgcaaacgatggcttcataatcggcataattagtctgaaataaatcgcatactcgtttgcgccatcaacccgcccagattgaataatctctttgggtatgcttcgtagatattgcctgaagaaaaatattgtcgcggcattggctataccgggcagaatgattgccgtatagctattcaccattcctaaatcattaattagactgtacaaaggaaccagcagtatttcgaaaggcaccatcataatgagcaaaacacatataaagaggaagttcttacctttaaaatgatatgctgcaaaaccatatgcaacaaatgcgcttacaaaaagtgttaaaaccacttgaacgattgttaaaatcatactgttccaaaaccacacaaaataatcatgttctccagtaaacagaaagatgaaattatcaaaactcatgatttcaaaatccaaacttaggttaagaccatatctaactaatgattcacctggtttaaaggaagatagggccactgcgtagaatgggatcataattataacgaatagtataatgaataaacaaataattactattctagagatgaaatcactcctcgtctgacttctgcccactttaatcctcctcctttttgaacattccactaaatttcaactgcgttaaattgataaccatagcaatgattaacagaacgataccaactgcagctgcgtaacccagcttattctgctcaatcccttgtctatacagatatccaacaatggttaagccaatattttgaggtgatttgttaccgttgaacatcatcaggctctcggtaaacattgctaaacctgcataaacactaattgttgtaacatataccgtggtcggcttcaataatggcattgtgatcgttctaaacttctgccaagcagatgcaccgtcaattgaagcagcctcataatattcattgtcaatgcttttcaaacccgatagatagtaaagcatattaacgcctgtccatctccaacatgcgaggattaacagtgctgccatactccaatttccgtctttcaaaaatttgataggctctacaccaaatagacctaggaaactgttcattaatgaaccttccatctcaccgaatgtaaggcggaaaatggtacccgcaactgcgacagatgtcaatgcagggagaaagaaagaagatttaaaaaactctcttcccatcattaacttactgttgatcataacggcgaataacatgggaaaaggaatcaacagcactaaggttcctaacatgtacacaacgctatttttaatagatgtcaaaaacactttatcagtaagcaatttcgaataatttgcttcaccaatccatttaggatcctgtcccagcatcctatcttgaaagctcattacgaatgaatttacaagcggaaaaaaccagaataccaaaaatatgagtataaatggcaatacaaaaacataaggtgcaactttttgagagtatacaaatttctttatcatattctcaatctcccttgactatggttaaacctgccgaccactgtacctgccgacaggtttaatcaaatcatttacttattatatttatttcaattcttgttcaattgctgcttgtgcttcatccaacgcttccttcacgtcttggccatcttcaaagatagcattcaaagtaaccgtattgaatatattgccgatggttggtgaagctttaacggacttaatcgctctaatttcgtctttgatttcattcaaagtatcaaatgcatttgttttaaagtattggacgtattcattttcagggtttttcgtaactgcatcatctttccatacttccatgttgattgggtcaaatccaagtgtattccagatttctgtagtagcttctttggaaagcttagcaaaggctacaaattcttttgccaactgaacgtctttaccattcttagtaacaactgtgccagtaccgcctaagccaacggaacgaggattaccttcttcgaatacaggcaatggagctattgcatacttacctttaaggtctttcatttcgtttacaaagcgggacatgtaccactcaggcatcaatgcacttgcgtagttgcctttgttatattcaccttttgcttcttctgtgtcgggttgtccgccagggatcgtatgaataacattgttcttctgcagatcgactaacatttcatacgctttaatcatttcaggcgagttcacttttggattaccattttcatctgtaaaatcggcattttgctgagctagtagcagcgatgcttgccacgaagctgatgtatcagcagtacctaagtacttgccagtcttttcgtaaaccttgatacctgcttgtttgtaatcttcccacgttttgattgtcttgtagtcaacacctgcttgttcgagaatttcagtgttgtagaaagcaagcgtagcacctacgtgataatcaaagccataaacctgatcagctttggagtaaatctcgacacgtgaaggaacaacaacgtctttgtatggtgcaaatacatcattcaaagattccaggggaacgttgtcaccttccaagaatttagggaattgaccaagctcaatatccgcgatatcaggagcaccttttccgcttgtaactgccaataagagcttgttgtgcatatcatcgtaaggcataaccgttacatttaacttaatctgtttgtctgggttctgttggttccataacccgagcattttatccaaatgcttgccgtgcaaatctgcgaatgtccaaaatgataattctgttgcattctcaccggcattagcgcctaattgctgtgtttccgtttttgaaccagaaggattaccacatgcagtaaaaacaagtgacataataaggagtgtaacgatggagattaaagcactgcgttttttcatttgttcgtcatcctctcttttttgttatgcatttgaaaagtcggctgactggttagttctgttaatttaagcggttacaatccatcttggcaccaccatccttaacataattctaacctttcaaagaaaagaccccttcgcaacaatttctcagattccatattgtaagcgctttacaagccgtattataatatatatgaaataagctttatataaccaattgattataaaatcataaagtttatggggagatgctactctttgaaaaagctggcgctctacaaacaaattcgagaaaacattatccagaaaattaaatcagggcagcttcggccaacggaccgcattccttctgaacaagaactaatggacgaattcagagtaagtaaaataaccgtcaggaacgccctaaccctactagctgacgaaggattaattatacgcgtacaaggcaaaggctcattcgtctcttctagtcttgttgtttctagcatcaatttctcgccatccccaagcagcgcgtgctccatgccgctcatcggcttcatcattccgacgatgagaacccgtgtcattcagaagctcgttgactacacggaacacttcctacaagaagcctgcctcagcatggtactaagcatcacgcgcgagtcctcctctatcgaatcaaacgtcattcgtacactaacggagctcggtgtgaaggggttgatcgtttttccaacagaagatgagaagtataacgaatcattactgcgtctgtcgctcgataaattcccgtgtgtgttcatcgaccgctatctgcgcaacattgagacgtacaccattacatccgacaattacggcggtgcgtataaagctgtatcccatttgttatccaagagtcatcagcagattgcgctcatctcacctgaaaatgccaatacagccgtcgaggatcgtacgctcggctttgagcaggcgtacacagatcaaggcatctcgattgacaagagcttgtggtgtcacatccctctcgacattctacgcagcgagcaagcattggactatgtaagcaacttcttgcagaaccacagtggaatttcagcagccttttccttgactgaagaaacagcacgccttacatccgccgctatcagtcttctgaacgttcactcaaatatcgacttgctatcttttgataatccacatctttcaggcgtagcttatgtgcagcaggatgaacaggaaatggcacgaacagccgtaaagctgttacgtgaacaaatggatgatatctattctcctaagaacgccgttattcccgtgcaactcatcttcccttgacacgacaaacgttgcagcctacacaatgatcttgtcttcagcttgggacaagacttggttcctaaaaacaaaaaaaggcacctctgtggagagatacctttagctatattatccgcaagacatgtttctggctgagcaacggataaacattgaataatgctgcagatttcaaacaccataaataaatttagttgtcattgtatacagcctccctttttcgcagtaccactacgatatctgtctgaggtacaaataaattataattcgttacatgcacttgtctcgtttcggttactgattctatctttaattcaggaggaagacagcgctctatgtgagtaattaatgtttctttggtaaatctccaaattacaccatcaatcgaagagttcgccatataaccaccgtccgttacagaacctgaaagagacttgagaacaaccgggtccgcaataatgatagatccaccgtcacgtaacagtctgcagctctctatgaaggcttttttgtgatagcgaatgtgatgaaagcttcttgcaaacaaaatcatatcgcaactatgatcaggtaaagaagtcggtttatcaatgaaagcatggatataagaattaaaccttccccacttctttccaagttttagagcatttatattcggatccatgttgagaaaacgaacatccttctgcttgcgaagatacttgttcaataaacctgtaccacagcccacctgaagaacatcgccttttaaagggggtaaaactttgtaaacattacgaggaataggaaaattttgaacgtacatggccaattcgtagaaaatcggataacgctcttgcaatcgaaccaatttactggtgtagaaaggattccgctttttgtgacgtttaaagtcccatttgttcaaatagtagacaggggttaacagcaagaacagaataataaagacactttggacgctataaattccaagtttactaaaacgatcattggaattatgagacatcatttgtttagaagtattcaaaatgatcactcccctctcacaacgctataaatggtgtagaacctctttaacataataaacgaatccaatatatggttgaatgcgccgaaaaatacagacatactatccgtaagcaatgcttccttccaaatgacttaagaagcgaagggaatctgatcatgcacaattcaatcgtatttagagaagagtattttttgactccttcacccccgtccatttgaagctgacaaaagaagagccgtttacgatgatgtatcacatgtgtttcaaccactggatttgaaagaacaggttccattataattatgaactgtctgtataagccgttttggagaaatcattttttcgtggaggcctcaattggacaatgtttgtcgagcggcgtaacgaatttcgcaacgtattctaacaaatgttacatcaacaggaggctgatgctacgccttatttagctgctgctcaatatcaatcatagtcgtcttggtttggaatggtacaatgttcttatccctcgtctgagcatcgaaaaagccgcccacaggcgaccttttgagcaagaatacgattttcaatctgaagtatgatcatcaggacgatggatcatataggtatgcaacatgttcttcgatccaatcaatttgcctgaatccatagccggtcatcgtttgctgcacatccagcacctctaattccggtgcctaccaaggcgtttttttcgtttccatcggtcgtcccctctttctgcaaaaactggaaccaagatgcgagcacccttacattacttgtgcgatacaaacttttaggatacgatatgtatctttttgaaaattataagacacaatacgtatctaagtaaacaactatttcatccctttctatgggttaagtatttccctgtagcgctactgacccaagttaaagcccactctcctctagatagcttttttattttgatactcatctaatcgttaatcggactattttcttgtccctcgacaggaagagaagttccctactaaaactcgtcgacacgcgcttcacgcactcaactggataaagccattaggatatatgtgtgtcaacaaaattctaattagaataaacttattaattcaatcagtatactgctgaagtattctttgttcagcagagattttctccaagtttgagtgaaacaactgatcctcctcctatcaaaaaagcagccccgtcaggagctgcctcatgtattatcccttatcttgtaattttatctgtttacgctaaccagctaacttactcggcacccggataagggttgatcttctggatcgttccatcttcgttgtagttcagctccgaatatttaacgcagcgcttgtggttgacgccttccgacagggagctgtcgtgatagaacagataccacttgtcttcaacttgcacaatggagtgatgggttgtccagccgataaccggagagagaatctcgcccttgaacgtgaatggtcccatcgggttcttgccgatcgcatatacgagcttatgcgtggttcctgtagagtaggacaggtagtaatagccgttatatttatgcacccatgggccttcaaaatatctccgttcctcatccccagccagaatcggattcccgtcttcatcgacaatcgatatctcggcaggcttgccttggaaggacagcatgtcgtcgctaagcagtgcaacttgcggtccaagcgccggctggtcaggagcaggtccttctgcatctggcacgaagctgccggtctgccatttctccaactggccaccccagagtccgccgaaatagatgtatgactgattgtcgtcatccaccaatacggccggatcgatactgaagctgccttccatataattcggttgcggcatgaatgggcctgccggagactctgatgttgccacacccagacggaagatgtcgtcatgatcccgtgccgggaaaaacaggtaataggtattgttcttataagcggcatctggtgcccagagctgcttggaggcccacggaatatctctcagatgcaacgcttcgccgtgatcaaccaccggggaatcgaagttgttcatcgagaggacatgatagtcttccattttatactggtcgccgttatcgttgctcggctcgtcatgatcgaggtcatgggaaggatagatgtagattttgccctcgtagacatgggcggacgggtcagcagtgaagatgtgggttacgagcggttggtggggcttaggtagttgttgttgattcataaggcatctcctttggtattggaataatagaatccttcatatacgggattacggcaattcattgattgcatcctcagaattaaaagcaagcgtttacaatctctaatgtattgtataagccccgcttattctttcctagtacacataataaagaacttcccccgaaaaaatgtacaattcccgcccatctcataattcttatattctacaatgaagtgatcttttttgcgttgtcttgtcgcacatattatttcttctcctctggatcgcaaccattatatgtcttcacaagtttttgagttcgtaagctttttctcgaagttccaccgtctcacgttcgtaatacacttttcctttattatcactgcactctttcggaaatattttcacttatttcttcaggattttcaacaccaatgatcaactttgatattttgaacataccaactttcaagctattcaaatctaaatgaagagtttcaagctcattttcaaaaaagtggagttgataaccaccatttgttctaaataacccatttctcttttctcctaataaagcaccatatagtttagaagcattgggtattggtctacctgttgttattccctcgattgaagagtatggaatttgcaaccctttatctaattttaaaaagggtgagtttccaaagtcgatatttacgtaggtttccattagttgaattttacgttccatattttgattcccccattttcttttcaaataatccatttatttcataacccataattacatataataccacagacacctcttttattcatgaaagtctaagtactgccctccgcgccttcgcgggttacgtcctcctttttatattccatttccaatcatttattaaagaacctacgcgtgtagcatgtagtgcttaaacagggacttatctttaacctaaacactaagaaaatactatattttcactggacaattagtttatttttcctacacatttgttaaatgaaattgcatgaaacttagttaggtgtttatctaatcggcaatcggtacaagttcttgtcctcgactcgggacaagaacttgtaccgataaacaaaaaagccgctaaattagcgacttcttcatctctttcaagcgtctcttagcacaaaatatatgcctagttctcaagctcatctacttggttacaactgtatgttatgacctgctgaaatcatcaccaatgttaaaatagaatggtttcgggggtaacccccttaggatactcttcttcccatacgtttttctctacataggcctggtaccacatctctgcaattacatccggatcattaattgcgccagtacctgactccttgatcaataaacctaatgagcggtggcccacaaaaatcccttgagcagacaatgaagtatgaagattagcaacataattgcgtaaccctgaaagagcaataccgatattccccatcatggacacagggtacatggcggataatcctgaggtaaagagcaaggctccctctttcctggcgagcatatcagggagaacagcattgacgacatggatggcactaaccacattcgcctcaaatgcgtccctggcgttctccgccgttaactccaatacagaagtgggaggataattgcctgctgttggactgaattccaacacatcaatctgaccatacttttctttcatgttggtcatagcctgtgcaatctgttccttgttaaaaatatctgctacgaaataagatgcctcgataccatccgctttcagttcatccaccatatcttgcagttttgcagcatttcttgcaactaatgccacttggaagccgcgcttgccaaagctcttcgcaatagataatcctaatcccttacctgcaccaacaatcgccagtgttttcatttatgattctccttttatgaatgagttagtgagttcaattgacagttgtaattgtaaaacgtacacttaaaagactcaatggtcgatataattcaatgtgttaattaaacatcacttttgataaatccgactattatttatggaggggaagcacgaattgggtaaagataaagtggatctgcgcattctcaaaacgcggaaagccattaaagaagcgtttctgagattagtacaaaccaaaggctatgaacgaattactgtgcaggacattgccgaagaagcgatgataaatcgcaacacattttatttgcactatgtagataaacctcaattcatggagaagttatttcaggaaaacgtggagagtttaaatgcttgcttaagcctggaagtgaattcaattcatgagatggataaagatatgtttgctaccatgttaaaaacgattttcgacgatattgaagccaatatgatattttttaagacaatgatcactcaaaatatttatccaaacttctccgtatacttgaaagaggcttttaaaaccatcattttttcgggaatcggcgatcatcgccacgatgagaagataaaaattggcatcgaatacatgatatctggattggtaggagtaatttgtctctggatagttgaaccggagaactacagggtagataactttatcgagcaactgagtgaaattcactattctaacatggttgacttgctgaaggatacttgataataaactagtatgatctgaacagaaaggctattcttgccgaatctgatctggctcgactccctgcttagatctgtcagaactaggcaggcatagaataatgtttgcagtcagatacgaagataacggtactgtccttactccggcgttctcaacgcttccaagtaccatgagcctgtcatgaatccacatgacaatcatatttggacacgaacatttgaattactacctctgccaagaagccacaattcgtgttcctaagcatgagcgtgagataccaagagcaatctacgaaaccgacatcgacgagttcgtaagcacatattcgcgtcccgatggttggcgcagattgattggtctttaccggaaaaacgttatttctaataaaaaaatcgttattcacgcgaattcttaaattcatgtgcttttttcttgccacatgatcttcatcatgatgctatttagatagatacctaattcgaaatgacacaatgttcttgtccttaaaacaaaaaaagccgctgtaatagcgactttaatggaacaatgttcttgtccctcgacaatttcgttctgtttttgtttttataagttcccctttcttgctttttttagcgatgtcactcttcgatcgaattcataataactttaagccttgcgaagcatttgtctctcgcttagatgtgaaagcatatccttcgtcatggccttcaagtcgtagcgagcatgaaatccccattctgttttcgctgccgttgcatcaatggaatgcggccagctatcggcaatcgcctgtctcttcggatcaacgtcataatcgaggataaagccgggaagctcatcccgaatcgctgcagcgatcgcctccggatccacgctcattgcggtgacattaaatgaatttcggtgtatcaaccgggaagaatccgcttccatcaaatcgatgattgcgttcagggcatccggcatatacatcatgtccatgtttgagtccttggcgatataagatgtatatcggccagccgtcacggctgcgtaataaatttccacggcgtaatccgtcgttcctccgccgggaggcgtcatataagatatcaaacccgggaatcgcagccccctagtatccagaccgtatttgtgaaaataataatcacaaagcagttcgccggacactttgttcacgccgtacatcgtattgggcctctgaatcgtatcctgaggggtattgtctttcggagtcaaagggccaaaagatcctatggagcttggagtgaaaaattggcagccgagctccctggatatttcaagtgcattcatcaatccacccatattcaaattccaggcaagcagcggtttctcctctgcggtagccgacagcagcgcagccaaatggatgacggtatcaacttcgtaccgcttggcgatttcgaacatcgccttatcattcgtcacgtccagcagctcgaatggcccggatcgggtaatttcgtgggctgatgacctgagatccgtagcaatgacgtgatccgcaccataaatttcacgtaatttaacaactaactcagaaccgatttggccgagtgctccggtcaccaaaatcttgttcataagacattcctcccgaaatgtactcccgcgaatgtagctaaatcagtttcatttccttgccaactttctcataaacggagatcacctgatcgagcatatccttggtatgggcagctgtcggcatgttgcgtattcttccggttcctttcggaaccgtcggaaacagaattgccttggcgtaaacgccttcttcataaagccgtttgctgaactgttgggtggttacttcatcgccaatgatacaaggtgtgatcggcgtttcgctttggcctacatcatatccaagccggctcaagccatttttcaaatcattgccgttctcccacagcttctcgatcagctctttgtcattcatcaaaatgtcgacagaagcgctacaagaagcgattgcagccggaggtagcgatgtcgagaacagaaacggacggcttctcagcttcaaccattcaatcagttgttttttacccgccacataaccgccgacaaccccaatcgccttggaaagagtaccaatttgaaagtcaatgtggtcggacaatccaaaatgcttcacggttcccgcacctgctccgagaacgccagaaccgtgggcatcatccacataagtaatcagatcgaattcttctgctattttcacgatttcaggcagctttgctatatcaccatccatggagaaaaccccgtcggtgatgaccataattttatggtactgaccggattccttcgcatctttcgcctgctgtcttaaatcattcatatccgaatgcttaaagcgaatcaccttggctctcgacaggcggcagccatcaataatcgaagcgtggttcagctcatctgataaaatcgcatcatgctggtccattaccgcggatatagcagccatattgcagttaaatcccgattgatacacgataacggcttccgtttttttgaaacgggccagtttttcttcaagctcaatatgaagatccatcgtaccattaattgttctcacagcccctgcgcctgccccgtatgtctgcgacgccttaactgaagcatcaatcaggcggtgatctgttgccagtcccaaatagttattggaagacaaattgattaaggactttccgtcgatacgaataacaggaccatttgcaccctgcagcgtatcgatgacgttatatagacctttagtctttagatcttcgatgttcgaacttaaaaattggtccaatgcttgacttgacattccattccctcctcgatatacgtatgtcctcgtacgggagacacataattctctgggaaaaacctgttataaaaagggttagattgattttaatgtatcatctttttatttttttgtacacatgtggcggacaaaaaaataaaaatatccgcaaaaaaacatagcgattgcttcccccattctcggaagcaatcgctactaaatctttgcttatatcttttgctgctcggtagtttacgataccatgccgattagatacacgactaatcgtaataggaacaggttcttgtccctcgacagttgccaacggtatgaagatatttccgcagaaatgtcctcatcatatttctctagttagcttaacgataaaggagcagctgccaaccgacgaactgctccatgttatttagaattaatgtctcccgcttgcgtaatgacctgacatatgtgatacggttcatcttaacgggtctataggcgaaaaaaggagctatctttgatatttttttacaagtcataatgtactccggttaacttctcggataataaccaaagtctttccgcaagctgcacatccaatgcctttttggggaaatctacaaacttcggtttcttagcctttagaggattcattcctagccctacgtaaatatctccggtgattgtcgaatccgtcgccgcaataagtgatggccaagatgattgatcaggaggagttccgaatattttcattaatagcagtccgaatgctttggttcccttcggtgcgtttctcccgattcctgtaggacttgtaccaggatgtactgctatagaagtgatacctttcttcttcgcacgtcgatttaattctcgggcaaacagtatgtttgaaagtttcgagcgattgtatcctgccattggtctgtatttcttatccatttttaaatcagaaaaatctatatcacccatttgagctgactgtgcgctaactgtaacgattcgaccgtggttcttttcaattaatggcaataacagacctgtcaacgcgaagtgtccaagatgattggttccaaagtgcatttcaaaaccatcggccgtcagttcacgagtgggaactgccattaccccagcattgtttataaggacgtctattcctttcactttcccgtggatcgtgtcggcaaagcttcgaactgacttcagataagccaagtttaatggctccactgtcacatctatattcggtgccgtttgtttcatctttatgattgcttcttcgccgcgcctaggatcacggcttccaatgatcactttggcaccgtgcatcgctagctctaatgccgtataatagcctaccccgccattgcctcccgtcacgatagcggtttttcctcttaagtttgggagatcgtcaggcgtccagtttggtctcatggtttattcctccgaaagcttatattttaaaatgtaattgggtcattactgcagcaaagctgtttcagtcagtcgtgaataaacgaggattgtttgatatatcgcgcatgttcgactgaatcgatcatgaatctagccacgtcgacacgagaaattttagctagcatggaaggagtaaaagcgccgtgcttatatcgccctttgcccggctcatcggtgagccttgaaggctgaacgatagtccagtccaatccacttttccgtacaataccatcctgcctttccttatcgtaaaactctcggaacgttattaaagaaactagttttacaatcattctcatcctaattccaagctgattcctgctttctctgctggtgccaaagcccgtaagaacgaccagtctttttactttatgccttctcatcgcgttcacaattgaacgagtcccacgtaagcatagatctgaaggacttcctgctgtggctcctaaagctacaaacaccgcgtcttgcccctcaacagccgatcctacatcctgttcactaaatacattgccttctacaactgttaatccctcccgggtaaacgggattcgatctgcggcacgtacaaaggcttttacggtatgtcccttgttgatcgcttggttaattagctgtacgcccgtacccccgctagctccaaagatggttaacttcattgttttttgcctctcttttctctatatttccgataataagtgaatattcgtttattattggtgaaaagaacagcgatgcgtagcatcgcttaaaaatactttattatgccttaatagcgtcccaactcatcttgatggcagaatctaattgtttactattcaatatggtcccgttcttcaaatgtgttttcaacaattcggctattggcaagatggagtaaacaactagcatgttaatatcctctttcttcaagatctcctgtcggatgccgacttcaaacatctcgaagatcggttgaaactgacttgccgtatcctctaggcaccatttctggggcaaaggcgaattcattatttgctccagaaacaaaaaatattctttgaaggattgaataaaatcaacatagttgcggatgatagcctcaaatcgttcgtaaactgttcgggtatgatccactccctgaaacatatcctcgctcatcttgcctttaatcttcaagtaggtcttatagagcagatcctctttgttctcatggtaaatataaatcgtcgctgccgatacactcgctcttttggcaatttttgatatcgacgtgtcagagaaaccgatctcattaattagctgtatggtcgcgtcatatattgcttcgactttgttatcatctctatatctcatgaaccaataataaacgatcatttatttattgtcaattatagtaaccgctgcgatttttcctacacgtttaataagcatcgtatgtctcctccaactttgtacataataatagaaatatctagtaatctagcatatgtatcacaacaaaattttcatatcgttccaatataagagtcgaagtttagtcatactggcagcaggaatcgtaatgttgtaatgacagcccaatccatgctccatgacttataactaatattcttttatcaacatattctttaatcagttcgagaaaagttagacctcgctttgcgaccattttgaaatcttccataccaagattttgctcacgccaatttgctccccaacgagtgatacgctcttcctcggtggtgccctcaattaggccgcaattaatctttctaatacgttcatcattgaatacgggtactcctaaacattgctgaatgatttcggcagtttgcctagctctcgttagattactggagaatataacatccgattcttcgcttgaaagtctttttgccagtgcagttgcttgctctcctccttcttcgtttagcggtatatcagatattccttgagccttgctaagattattccattcagtaaccccatgtctaataagacctattatggtcgccatacctgcccccttaatgactacaatttccccataattgcccaaacaaatggtaccacatattggaactatactgcccgttagtttaatgaattgaagggcaagatgacgattagttatgcgtctaaccggaaacaagaacttgttccgataaattaaaaaagccgctaaaatagagacttcagttatcattttccgttaattcaccagcgagggatcttaaagcgtaaaatgcctccacttcccttcggagacaacttccactgttccatcaatcaccttaatggcggtttgatcatcaatcgcatatgcctggccttgaatctctgtggcccagctctcagcagcagccatggtgttgtttggcagcatttcgtgctctagatgcggaaaaattgaaaaatcaaccagccccagtgtttcatcactaccagtgggcgcagtccaaccaacaaataattccccgatgttaggtgccatcaccatactccccgcgctcattcccacataaaccgccttcagtgaaggtaaaaggtcggccaatccagattgccgcatccaatggtgtaggaagagggcgtcgccgcctgcaccagcaagacgtctgtttcccgaaccagcggcacccagcggtctctactgatgcttggcagcgcggtgagctccagtacaccaacagacttccagcctaggtcgaccataggattctcggatttcccgctgatgaactgccacgttttgactccaggcccgacccagggatgtccgtacatcgcggtgggaatgcacagagcgttggagtcagcgatcggcttgtccaacatatcaactagcacgtcgtgtatgcttttgttattcacgcccgcagatgttagcaataatttcataacctcactcctattcactttgaacttcgtatttcatcttactacctattgttcgataaaattgattgaattaccctgcatgttaacttaatgaattaacgggcaaactggcgatagtaatttcttcagttccaactctcattcaatgtagcttatcatattaattacctataacaaattaatatgataagctacatgaattgtttcgtgctgataattggagttgcgatctttttctgcaaaaactgattaggtcatatttatactgccataattctattcctctattctacgtttagcgaatgatcaagactggcattcagcatacgtaagatcatgagtaacgattcatatctcgtagcattagcattcggtctgaatacaccatccggtgtaccctttacaatccccatatcggataatgtaccaatctctgcctcggcccagtgacctataacatctttgaacttatggtttctcacaaaggaagcgttcattacttctgaaagcatagctacgatttccgctctggtgatcgactgatccggtttgaatgttccgtctaagtaacccttagcaatgtctattgtttttaatgcagcaatggcattggccgcccagtgaccttgagtgtctttaaattcggggtcaccttctgacgttaatccaagtgctcttactagcatagatgcaaactctgctctagttatcgtagcacgagcacgaaatgaaccatcatcatatccgttgataatcccaagcttagtcgcaaactcgattgctttagcatttagggaaatcgccggcacatccttaaatgatactacaggtacagaattcgcttttgctatcagtgccttaattacatccatattaactccatcaatgtagaatgctttaggtgttggcattgaaccaatttctttctctggctccggtgctggctctggtgttgaacttggtactgatgcagaacctgaacctggtgctggtgtcgtttcacttaccgtgattgcaagcgtctgtgttgctcctccgctgaatgtgaatatcaaatttgtcgtgccgaccggttgattcgccaagtacgccttgaggattgtaactgtgttgcccacaaccgtataatccgtccctaacgttagcaaagttaaaccgttcgcgacacttgttaatgtgtttccattcagcgtcatcgttgtccttacgtctgcttgggcggataccttcttatcaaagtttacgctcacagggctgatgaacaccgttgatctaatctcttcattagcaaaaactaattctaaatacttaggagtatgtgaagctattagtgttaatggaatcgcattctctacaacatctcctattggcgtaacagttgttggagtgccgtccacacttgcatttctactcagtagatatcctgttggcgccgctacctctttaacatagtaaggcaagccatatttgattcgattgaattccagttctccatttacggttaccttttcttgaaccttattgccatattgatcatacaaggcaaaggatgcaccagataatttaacattgttatcatctaaatctgcctgtttaacaataaatttaccaagattaccgtatcccatgcttcctgattctacaaaggttacttggcgtgcatcattggactgataagcaccatcgatcggaactacaacattatctttagagccggacaaatgaatgctgttcgtaaaactggatccagaggtcaccgtttcagttacatacgtacggaacgagatcttatatgccttgtcaattgtaccattcggcaaattgaatctaaattctctggttgtagcatcatagacaatatgagagccattaagtggtactggtatacctgtgcctaaaccatcatttccgtttgcaggaatattgttaggtacattaattgctccactgtatgcgattaattctacacttgtcgtgtcaagctccagtcccgcttgcagcgtatcgattaaccagaatctatcgacacccagtaactgattaagattaactgcattagagttcagatatacaacccaatcaatatacttgtttccattagccgttggaatacccttcttacttacaatatggttgctgacggtttgagttgctgaaacagtagtggatctggtcgttttatcatgggttaatgtcgctttattcgtaatgttaaaattaccattattaagcgtattgttttgtgaaataaacttggatagatccgtgacggcagtatcgaagtagattgtgtattgctccgtaatactggaattaaaatcaaaggttacgacatctgttccgcttaccgttaccagacccgtgacaggattactgttgcgatccagtaccctgacgctaccaggtataaaggtaagtccgtcaggaatagtatcaacaatgcgtacatttggaagtgcaatagcagcgtacaagctaggatcagttcctgctttcagtgcacttggagttgttgctccgttttcattgacagtcaacttccacgtaattgtacggtcagctacatttagatcataagcttccgcatcctttttcaacacattacttgtatagttctgcatgcctgatatactacgttcaattgcaccactactaaagtttgctgtgtttgaaaagctaccgctagaattagctgtaatgttctctgtagtagctggcattgtatcaaaagtaatggtgtatttggaatcaatagcagaactaaacacataaattagtgttctagctccagaattatagttaaaattaccgccagaataagcattaccctgatgatctacaattcgagcagacccttgaatatactgttgagcgattgggatactatccgtaatcgttggtgcagcccaattaatatgttcactattaatattaattgaccatgaaattacaccgttcgctcggttataacccgcacctgacttgttgaaaaagttacttccaactcctactgaagcattttttactactccggttccagtaaggccatcccaagtaaggactgcttcgtttgtgaaattatatgagccatttgtttggaaacgagcaggctcaatttcagtttcgtacgtaatcgtaacctcgtttgtaatattacccaggttgaaggtaagctctgagccgcttgttaagggagtaccactagcaccatttacagttgctgttccagcaatgtaagttagcccaacgggaagtttatccttaataatgacattgttgaatcttagctcatcttcattcacgataaccgtccaagtaatattctttgtattattcgctgttgttgcaggatcatagctacccgatattcttaaaatattgagtggaatagttaccgtcttcggactatccacattcgttgtctcgttatcgtcatgctcaagataagcggtattcgttacaggaatggacggatctcctgcttctagcgccgcaagtaatgctgtttcctttaatgacgtagtaaaggtaatgacctgctgcgttgtaatattgcccaatgtaatagataagctgcttccgttatctattacagatcctagtggtagccctccattcactcgtatcgataattcatccagaatctggatatctggaatcatatcaacgagcactgcattattaacagcaacattttccttgtttactgtaattgtccacccaatgtctgttccgttaactaatgctccattcttttgcacagtaactttatctgactggagagccagatccgcctgaaaagcctgatctgtattgaaggttaacggtaccgtatctctctctagatcaggtgtatcaatcactgtagcttctggcattgttcctacctttgttctgatatctccactttgaataaattgagaagctacttgactcgtcacatcgttaccagcagctgatacgtatgtaattaatacgcttgaaatcgaactgatcagcaggacaataactagtaaaaacattaataaaatctttgtatatttccgcactatgttctctcatccttccacaaactatttgatggattttcttcaagtctaccaagacattttaaagccaactaaaggagattgtagtcctactaaagtagtatgccgcaacaatttttattcacttgtgatgcgcttcagcgtgaataagcttcaactaacctgaccgttaacataatgaattaacgcaaaacaacgatgagatatacgcctaatcggtattggtacatgttcttgtctactctggtcggtacaagttcttatccttagcttgggacaagaacgtgtatcgaaattttataactttactttacatgaaattgtaaacggtccttttccttcgtccactatattaatgatgcctgtacgcattgttattcgaggtctaccgtctctaccagctaccctcatcgtaaaacgaccacaaaaaaaggccaaccagtaattactggctaacctgatcatacgaaagccgctctgcggctctattattgtaaacccaccaccaaaaaaagagccagacattctcccacagttaaaggcccgattctatacctgttagaggtatttctattaccaaaggttcaactgcacctcatgtaactttgtattaggatagccgatgaatcgaccatactatatccgtactgaatccaatgggtagaccatcagcttcgtaataaaacccgacttgatcacctgcctgcagctctacatcaccggttaacgtcaccgtcgcactacctagtacagttctcatagttaaaactaacgctatattaacgtcaaggaaaggcatataaccttttattaaatcaatattgccattcttctttacagtaaaaaccggatcaatgtctcttcctatgcttacattgattggcgcgtcaatcttataattaacagttgcatgtatggcatatctgccagtgtccggtgccgtaaatatccctgttgcaggattaaacgtagagcttccgtaatatggggatgtctcgttccaattcgaaaatagcgtgctactattgattgagtatgtcgtaccggtaacagaaaatccttccgaggtaaaagaagtccccgctgggcctgctggaccttgtgctcctactggccctggatctccttgcggccctgctggaccttgtgctcccgctggccctggatctccttgcggccctgctggaccttgtgctcctactggccctggatttccttgcggtcccgcgtggccttgtggtcctgctggccccgaagctccttgtgctccaactggtccagtcgctccggtatcgcctttatctcccttggctccatctcctgtagaattctgcgattcttcgacaactgatggaaaagtactgatgatgatggttttaatggtggaattccatactacttttgctccgaataactccgcaataaaacgtactggtaccataacccggttttgaatgatcttagcaggttgatcgagcgcgatcttctcctctacatcaccgatttttacgctggcagtcgggtttccaataattagtacacccaatgcatctcctttaataaccgttatggtttgtgtggaactattccagttaagagacacaccgagcgattcttcaaggacccttaaaggaataagtgtggttcctttatggacaacgggtttgacgtcactctggactacactatcattaacaataatagagatctcatctatttggccgcctggagccgcctgagcagcagaaaccacagacaacgtcattacaagcacaaatataatggataatttcaatctttttatcacttaactttcccccatattaatgaatttttatcccgtaatcccggttgcgatcatctacagaattcgagccctgtgatttcaactaaagctccaaacaacggatagaacgttcctcattatcttcgagcaacaaaagaatcctatcattctccacgtagacattgtagacaaaattatagaagttgtagtcatacgaaagtagtacgctgctcattcaatcgggcgtactgcaacaattattagtatgaaccccttctacttgactcatcgtattcaggtaaccagtacttacctatgttcatgtccttcgacaagagttgcagccgatgaactaaattatcgagtctaaatttaaacgaccgattcccaggtaaaaatattgggaatcggtcgtaagcctattttagagtatgagatttcaggtccggtttgcccagcatctgttccatctgatcttcattcgctgtatccgaaatcgcaaattactgttcttattactgttctttatacacgcgtacataatccacttgcatcgtcgccgggatatcggaggcgttcggggtacggccgccgtcaaagtttccaccgattgccaagttcataatgaggtagaacggctcatcaaaaggtgcattcggattattcggtgcagctgcggaataccactgctcattagtgactttatagaaaaacttgccgtccacataccatttaatgttgtcctcttcccagactaccgagtatacatgataatcattggcaaaagtttgccccgccgggaagtgataatcgccgcccgaatactggttcccgggccattgtccaccaaagtgtatggtaccgcttactgatccaggcagacggcctctcgcttccataacatcaatttcacctgatgcagcccaagtgccatatactgaatcttttggaagcatccacagtgctggccatacaccatcacctgtaggaagcttggcacgaaaatctactctgccgtacttcaaggacagtttatccttggtgttaatctttcctgaagaatactgtgcataccgatttggatcctgcgggaaagatttaatatcattcatggctttgatattcagcttcccgtcctgtacatatacattttgggtgctgtttgtgtagtgctgcagttctgcatttccccatccccaagtaccgggatcgttgttgagataatatcctgtttcatagttccatttacttgtatccagcgtagttccgttgaattcatcctgccaaatgaggttcatgcccgcgattgccgggtcggttggcgttccgattgagatatcctcttgatcggatacatccggacgcggagcatttggattgccgatgaaagtatagttcacgaagttgttgccaatatttccacccgcctgtccgttcagcggatatccgatacggatctgcatattttcttggattggctggaaccaaagaccatagatataatcggcccagtaaccccactggttggcatcggacatattgttatacccattagcggagtatgcaaatttgctctggctggagttactcaaatcaacccattgcccattcatgttaatttggtatacaaaattgcccagttccttggcgattggcgcacccccatcaattttgggaagcggaaccccaatggaaccattcgcatctgctgtgaaggttgttccttcgtatggcgtaatgacatatgaatttcttgtaggttcattaaacgtaatggtataaacaaggttagttgaagaagtttttgattctaatttgacattgatcgactccgttacgttaaaccagtacccaccgccgccatcggtgaattggccaaagttgtgatcgtagatccagccgctggctgcgttattgtcaatatcaatccaggtgctgctgtttacaggtttgacatacaccttcaaatcatccgcaacagcttcataggttaccgcaggattattgttgaacgttggatatgtaaagcctgcaccgcctgtgaaacttgctgtgatttgtggaccttgtgttggattcatcgctgtgatggttgttttgttgatgttttggaatacaagttgatactccagcttaacaccattcgctttggagtacagttgaatctcggttgttgcggagagtgtgaaccaatagccattgaagccgccatcgctccagtgcccccagttttggttatagatataaccgcctgcctggtcgatatcaacccagttgttgcccacttttacattaacgcccacatcactgtgaacatcattccatgtcgcggagcctccattgaacttaggcataacaaatccgtagctggccttgccaaccccagatttagaaataacaggcccgtctgctggtgagaagtactccattgaggttacggtagttcccgctgcctgaacctttgaagctggcagtatgccaatactagccagcatcacaaccacaaggaacataccaagtacctttttcataaaccgtttcgccgtaaagtgagatggtttcataattgtcctcctttaatagaataatagcttttcccaatccatgtgcattaaggaaatcgcttacatgaagggatatctttattctatcgaataggttaattcgctgaaaaggtacaattgtttttgtggtatcccatttttttggcttttgattcaatctgccttctgccgcatcatttgtcggtactctgtgggttggatctgcatcacaagtcggaacgcgcgtgtaaagcttttgtagctttcatagccaaccatagcagccacctccacaattttatgatcggtttcggcgagaagccgccgcgctttatccagacgcacatctcgtaggtattcagcaaaacctttaccaatattcttcttaaacagatttgaaaaataagcataattaagcgatacatgattggataccatcgcgaggtccagcggtttgtggtaactttcgtgtataaaacgaatggcttcatttagatcctgcgaatggcgatagctgcacttatagtcataatataactgattcagccgaagcagctgctgttgcagtgcttgtatataatcacgcatcccttgataatcaaagagattacgcaatgattcaagatccagcacttcttcccccatataagggtggataactcgttcgtattcctccatcatctgaacggtggcggcgcagagctgttgggtatagcgaataggataacgttgcagcacctttttgtgaaatattgcagaaataccctgagtgattgttccgctgttatctgttccaaccgactggaacagttcatataagtcttcatagggaagttgccattgctgttccatatgctcaatatgtgctgggaagatactgtactgatcaggaaacaggtaactgtggcgatagagctcaagcacttgggtatagctgtcgggtagttcttttaacccctgaatcgggttagtcatggctgttatggcatcgatctttccttccttgagcgctgcaggcaaaacacttggatctatggacgcatccaccgcaaggatcaggtatgggcgatgttgcaggcaaatataaccttgtctgccaaacacacgataagcaatggcttccatgctatgggcgctgctggccccgggctggttaatgcaaacttcttcccgcagcagggttaggcgataattacgccataacgcaacattttgttcctcaatctgaagaatccatgcgtcatcacttaacgcaccttgcataaacattcttaattctttacgatcggtctcttgggcgagacgggatacacgctgcatattatgcgtaagtgcctgccgtgtctggatttcttgccatacatgctccagggaatgttgcagatcctctcgcttcaaaggttttagcaagtagccctttgccccaagcccgatagctttttgggcatatgtaaaatcactataaccgctgataatgaggtattccacatccatgtattcctctttggtttgagccatgagtgccaacccatccatatccggcatcctaatatcggtaatcacgatgtgaatgcaatgctgccgcaataggcacagcgcctcaatcccgctcgcggcacagtatatgttgttcagctccagaggaaattgatgcagcatggcctgcaggccgtcacgaatgtgtttttgatcgtccacaatcaggatattaatcatgctctaccaccctccaagatttacattttcccaaggcaagcgtatcgttacacaggtatatgcaccttgaacactatcaatccaaagaccgcaattcttgccataatgaagctgtaatcgcttattcacgttttccaaaccaagtccgctcctgctagtaaccatcggtgtatccgattcgctcctcagtactgcctgaagacggtgtaacatctcaggctctaacccctttccgtcatctcttatgttaatgaaaagcagactgtcattctccacagaaaaggtaatctctatagttaccctgccgcctgaaggtgccccgtgatgaactacattttcaacgatgggctgcatacacatcttgggaatggcatagcgaagtatctcctgaggaagatccgccgtcataacgatactgccaccttccataaagttgataaattcaatataactttggatattggcaagctcctcacgaagagcaacggtatcgctacgccactgcatgctgtaacgtagttgggagcccaacgacaccaatgaattggctatagcaggctgcctctgtacctctgccaccatacggatcaattccagggcgttatataaaaaatgagaattaatctgcgaatgcagggagtgcaactgtgcgtttttggcaattaactgtttatccacgacttgtgtcattagacgtttgacctcatgtaacattttattgtaattcactgccacctcatcgatttcatcccctctttcgttctcatcaaggcctgtatcaatcattgaatccagctcgcctttccgtacctgacgcatggataccaatacgctgtccaatcgccggaaaatacgccgcgtcgtttgggatacgagtagcataatcagcagcaatacacataatgtaatcgttacaacaaatgcataccaactgcgcggccccttcatcaatgcctgatgggaagcaatctcgaccacataagtgttcaacggagcgatgtatcgatacaatgcatagaagctctgatctcccaccttaacctgaagcgggctttcctgccgcaatatatccagctggtgatgaatactgccaaggatctcctccatcccctgcccgtacttctcagaaaactcatgctggggattgtaaacatactggggaggatcacttgcgttcatcaacaccgaaaagaagtcccccttgctctcttggagcagatcgctgaaaaacatgctgtgcgggactcgcacttccataatactagggcgtttttgttcctgtccttgaaggcgaaccagacgatagtaggataatgtgtgttcaccatccctaaaagaaaataaacggtaagccgcaccaccttcgtcccgaagctttacccaataatcctgcggccaaaatttcttataatgatagatttcaggccagatttcatacaagtttgggttatcaacgtaaaagctaagctcactgatcatcgcattgctttgaatgatattaagcatttgctcaaactggttctgcttaaacttcaccagacgcagtccatccacaagcatattggaatgaataaaatccacaaatgacttttgagtaagggctgtattggaagcgttctcaatcatatccattcttctgcgcaattgttcattcagccatgaaacgtggctgttgcctgtcgccatagcgtccttgtatagctgggtttcttgcatgcggatatacacaaaggatatcaaaataacaggaatggcaatcatcaggctaaaggccagaaacagcttttgggatatacgggcattgcgataaagcttcctcaatctcgttagtaggtatttcattctgatgtattcaccacctttgttataccatatattactagttagctgatcgttaacaatgtagtagggagtggttatctggctatcttggatttccgcagttccagttcagcctggcgatattccatcacctggttaaagccgtagttcacacgacgtatcagaaaattctcaaaaattttgtcaaaggcagcttcatccttcgctgtaatcagttctggcagcacttcttcccaattttgagaaatacgtgaccaggctaacgctatatcggaatcccctataggatctagtcccttatagatgccgctgtccagatcggcctgttggttggcgaactcctccatttgcttaatggatggtgcattctctggtctccacttgttaacgaaagcagggtttcgcagcatccagtaggtatccataatgccatattccttttccagccgctccctatccgtgtcatacaactgaaccatcgccgcagtcaactgcggtttgccgtttttcatcgcccaggtttcaccttctttgcccaaaaataaatccctttggccttcttcgctggccagataggtcaaaaatcggatggcccgttcagggttttccgtggatttgctaatcattgtaaccatccagccatccatgctgccgggaaacagtttcgcggattctccactgctgctccggggtccatctacagcaatatagtatgaattctgattcgtaaggacttccaatttcgaattaaggtccgatatgtctgtccattcccgaatcatcataaaatattgggcttggttggttttttcctgcacctgtgcactggagtcgaccagaaaatcaacattaatcaggccctgctcgtaagcgatacgaaatgttttcagccactcaatataatccggatctgtcattcggtcgtatactttaccgttctgttcatgggggatcgcaagcagattttgcaaatattcggtcatcccataggatgcattcccctgtgcccaaaacggactgatcagctgacctttataaacagaatattgattcttcagcagttgcaatgcatttaaaaaacctttcggtgtggtaaggtccggtttgtccatcgactcatacagatctttacgtacgagaaaggtttggttcgctcccgtcaagccggttgaacgcatctgttcgggactgtacgcatcattgggaatgacataggtatggccgtcttcctgccgataccattgtagagcaccatcacctgctaccttgtaaaagtaaggatcatactggttggctagctcatccagggcatagacgagactactctcccgaagtttgttaaccgcactctcccaggagccgatagttatcagatccggcagactaccggtcgtcaacatccgtgataacatctcgcttggttcaccagttgatacttcaaattcgatattgacccctgttttttgggtgacatatttggaaatcaggctctcaccccaagtgtgcccgtaccattcggctccaacgaaccacgttagattcacgggggtggtatccagcttccatgacggttcttccagattcagattaaggctctgtatctgctccgtgaagtcagcctttgtcgaagcacccttatcttccacttgctttgactcagaacaagcagacaagcctgacatcagaaacatcatcaacaaggctgtaataaaaggacttcgaaacataaacacctgagcgcctcctttctatactggccatctccatccccatctgcaccagcattcatactagtggtggtacaaccgattttactacccttggattaaaatggaaatggtttagtggtcgattcgcagatgatccgcaacattccccctaacgaaacataacttgtaataaattaatggaagggagaccaattcgtgtatttaatctggatacttattgtcggtgggctaattggctggttaagcggaaatctgattggacgggacgtgccgggaggcgtacttggaaatatcattgctggctttgttggatcgtggttagggtatgaactgttgggaccgagggggccggtggtgggtggatttcatatcatacccgcgatcgtcgggtcgatcattgctctcttgattttctatgctctggcgcgcgctggagcgtttcgaagacgttaaaaggcggagacgacaagttttacccaattgattgggtattgacgtaaagcttctttcgccacctttacatcatcttcttcacaaagcatagtatccacccggtagtcgaataaagccgccgatcctgttgatcggcggcctcctttggttttatggaaattagaaaccacctctagaatgaatgatttgtccggtgatccattgggaatcgtcgcttgccagaaaagcaatcagacgggatacatcttcaggaagaccgatcctgcccatcggaaattccggtagcaaagcttttttcacttcttctgacatccaacccgtatcggtaggcccgggatcaaccgcattcacagtaatgtgaaacggagccagctcagcagatagacattcggtaaaggtggagacagcgcctttcgttgcggcataagcgagattgccaggcatcggccccttaccttgaccggacgtgaggttgatgatccggccgccgcaaaggtcctgatggacggccagttcaacctccagcatacgcgcaaattcagccgatagcatgaatgtacctcgaatgttcatggcacagtgcgcatcgatcaatgatgcatttaattgacggaaatcagctgctacactgtaggtagcgttgttgacgagaatggtcggcagcccgagagccgatcggcatgcatcaagcagttgcgctggagaattgggatcggtaagatcgacctccatatgcgctgccttaacgccataggagcgaagttcttcggcaaagagatccggccagtttttgtcggcatcccccggattctctgttttatcgtaatcgtacagatgggtatagaacacattagcgccttcttgtgccaacgtgcggcagacagcggttccaatacctccggggcggcttgtgcctgtcacaatagcggtttttccgtatagtttggtcattttattacctccgtttaataagggagggagaaaaccatttttcattggagatggaattatcctaggtataacaaaaagcggatacatcaagtatccgcgcccgggtttgattcaaacggttcctcgcgtcccttgaatgattgcggatcggcatcacaaaccaggcgtgtggttataaccaaaacaccaagtcgagcgatccagtttagataaccattacaaggaagtccacatggtccggcgagtcccctttcctacatctccacttcaaatattacgagtcagactcaattactgtcaagataaatacatgggattagataacccgcagactgttcacttttttgaatgtaactttatattcgatttttacaacttcaattcatatcgtatatcaggtaaattctcttcattttcttgtcctctaccagtaattttaaatccattattctcataaaatctttgggcatttttattcacttcaaatgtatataaagttaattttccatttgcttgtgcttttgctttattaagcaaggttcgccctattccattcccttgataatcaatatgaatataaagttggcttatctcagtttcactataggcaatcattccaactactttttcatcaattaacgctaaatctatttgatactgtttagatagtatatgatttaaaaaatatagatggttttcgaagctatgggtttcagcctgaccaattgcccgttccttactatctctccacattttcactgtatgttcagcatacttgggattatagttagatattttaatttcaagtttgttcattaatataccgccttaaatagaaagattttcaaacgatgcagtaatgacttgaaaaatatcttcttgatccaagatttccgttctattgtaagtaataattcctgatgagaaatcaatgtcatcagtgttctatggccaccatttacttctcctgcccgtctattatatgcgttcattaattctgatcagtaatttctttaagatttgcttctcctcgtcatttagggcttgaacgatttcatcctccactttttgaaatgagttattgaagtcttcaatcaagtcaaccgcttttggtaatacataaatatttttttgccgttcattattggccgggattttacgttcgatgaaacctttttgctctagaccttgaagcatgcttgtaacgcttgccccacgcagatgaaaccgatctgcaagatccttttgaataatatgattatcttgattctcataaatataatcgattacttttccttgttgagaacttaatcctagctcttttatactctcatccgctcttttctttaacttaagaccgataatttgaaacaactccatataaggcgtatcttctcgggaaggcatgaccgtccatcgtcccctctgtaattgttaggaatctaattgtaagtagctaaaatatacagtgatcccagtaggcttgtcaaacaattgttagactattgactgttaggtatctaacagttatactgcgaagtgttcggtaacaaacacattaggaggatttatgatggagaaattaaatcaaaatgctgggttagaagaaattacggcgattacaaatgtacgaatctttgatggatatcaaatcattgctcccagacatattgtcattaaaggggtgtccattatttcagtgggcggagacatcccaagcgacgcaacaattatcgatggagaaaatgcgacattaatacctggtctgattgatgcacatgtccatacctcaattggcggattacgagatgccttaaaattcggtgttacaacagaactcgaaatgaacggcgattttactaaaagagggcgcgaaattcagctaaaaaatgtggatgacattgcagacgtccgatctgctggtacggcgattaccgctcctggtgggcacccagatgaattgctgcctgatggagatgaaatacctgaattcgtattaaaggaactagagaagctatcggaggaagaccgggaagcaatgttagccgcctacgctcacgatcacgacgaaatacctcaagtgacgacggttgatgaagcgatcaaacatgtgcatacccaagtggagaatggatccgactatattaagatcatgattgaagagggaacggttatgggtgcacccggcctgcctgttctaagtgatgagattctaaaaacagccgttactgaagcccacaagttcgataagttggtcattgcccacgttttgacggctctttcatcgaaagctgccatcgattttggagtcgacggtttgggccacttgtttatcgacagacccgagtacacgtccgaattggtcaaatccatagctgattctggagcttttgttacaccgtgcttggtgttaaattcatcgattattggtaatccggcatcggaattggctagtgatccaagagttcattcaaaattaagtccggattggatcgatattttgaactcaagcttcaatacattcccacaaggcaatatggagaacagctttaaaaatgtgatggatcttcaccgtgccggagttgatattcttgtagggacggatgtcgcaccggtacccgttccgaaccttggtggccttgctcatggggccagtgttcaccacgaaatgcagctgctggtgaaggctgggttcactccgatcgaagctcttcagtcggctacttccaaaccggcccgttgctttggtctacatgatcgtggccggattaccgaaggtgcacgtgctgatcttattcttataaacggtgatccgatcactaatatttcagataccttgtcaatcaaatccgtgtggtccaatggttcgcaaaaactaggctaaaactagtagtttatatttcctaattgtaaaatcactaagaagagggagtgcaaaatgcagtccctcttcgactttaatctattttcccaaatcttaattttttggaacgatgcccagatcaatgagaggtaattatgcttttggaattgcccctatttgttgaagcaagccaagcatatcgggttgaccatactcttcaataatttggccattagagatccgataaatattcattgcatttacttcgatttttttgctcgttggtggaaacccgagaaactctccgtcttgtgtgcccttcatgacaaaatgagctgctattagttcctcttctgctaccagctccttaacagtccattgtatatcggaaaaaccagatctcatcatatgaattatggagagataaccacttggaccattcattggttctttttgcataggtacataaaaaacagcatctggagaaatcaattcttcagcaagttccttgcttgccgtattaatgaagttcgtgaaacgatacatcagttgtttgttttctgtaatcgtcatatttaaacccctttctattttcgtgagcatatgccttcattaaaattttatctctactttagataattggtaagtaggcaccttaatgttgcataggaacctttttgtaactagtattttatctttaggttgcagagccaataaactgatctctaaatgctgtctccaagaattcaagaacgttaacatatgattcgaaaaatagtcactcagttgtatccataaactattttgcgaactccctcctcctttcattcattttcattttgatttttcatcgacagaattataatataagcaatgtattgttttgaaagtaggcacctttttgatatataggaacctaatagtaactattggaggcgataatgtagtgatttcaaaaaaagagttgccgttgtgtcccgtcgcaacgacagttggattgataggtaacaagtggaagttattggttatgagggatcttttgaagggaactcatcgattcggagaacttcgtaaaagtatacctgagatcagtcaaaaggttctcactgaaaatttacgctcaatggaagaggacggaattgtcatacgtactgtttttgcagaagtccctccgagagtcgaatacagcttaagtgatttaggaaattcactgaagccaattatattctctatggaaacatggggactcgggtaccagaaactcaatgatgaacttccaaacgatattcatcagagtgaatgatgtcaaattgttactccacggtcatttcaaaatagaataaattcctctacatcttcaagttaagtcaatggaggactcatgcgtcctccattaattcgtatgagagagttgatcttcgaacaccagtttctgcaatatttctattgcatgaagaaaaaacggacaagatcctcattaaataattagctatttaaaatcaaaatggatatgcactgtttttggatacatgaataatttcagatggaaaccttgccttaaaatatttttcgactttcagatgaattcttttctcgtaccatttctcccagccgttcgcctcaaataattgtggcatccctaaccgcttagatctcatccccatttgaccatcaccaatcaatagcgtatcaatccaaattcgatcagttatgccttgtaacatgttagcgaaattaggtgaaaaaggtagcacaggggagatagatacttgtgtatgtatccctgcatcctttatctttttcaaggctttgactcttaaatctattccaggagcatagggcgaaaaaattcgtttcacatcttcgcgatctgtctcgattgtcattgaaaccataattctacatttttcctttaatttcagcagtatatcaaggtctctggcaaccagcgggcttctagtttgaatttgaagtgaatctggtgggtttttatccatttcttccaataggcttcttgtaatgtttgccctctgctctacaggttgataaggatctgtggctgatgacatgaatatacttatgggtttatttttacgtcttagaagagagacttcccttagatagttttctgctgcatttttcttaacatccacccacgatccccaaggaatatccttaaacttttgaataggcatttctctgacgtaacagtattcgcaagcaaatgcacaacccgtatagggatttagtgaatgagtaaaaccaatatctagataaccttttacttcacttaatattttcttagacacaatgtctttgatttcaattggcatgacgttaccatcccctcaattacttttatgcccacttctcctcttgcgttttatcttaaaatttctcatgctacttgaaaagtaggcacatttttattagataggaaccagaatgtaactattgggtgttaacaacaaaacaaccgtttttataaataaaggtaacggcggcttatctttggcttgaaaattgaaaatatccgcaataggaccgtcaaaagcaatgatgcggtcggtaatcgtattgcgaggatcgcggaacgtgacatcaagtactttaaaccaatccttatattggagcaattgtttccctacaatgatgacttgataattacgtcccgcaagcgaacccggaaattgggcatccagctgatttttagactgtcttaaacctgctgctattcctcctccttcgtggcttttcttttgaatgtccttactgaatacaggggcagatttataataatgaagttttttatctttgacatccaaacatagtttactctgcctctttatttatcttttttgtgattcccggtttgccgaaagatctgctcgtatttgttgccgcacccataagttagactcttattttctatgttcatgtgggcaattcagtaatatcaacgttcatatgttcagtaagcattaaggttacatctactttcactttgctccataataatgtcattttatgaatgtaacctctcaccgaataatctaccgttaaactcagctcagatctcacttcatctatgatttttatatgatgttcctttagcctttgctttgatttgtacatttctaaagctattttcttttgggtaccgtccaggtagtcaacatacacagatttcattttgaagtttgaagcgtatattttatgcttatctacctccagagcacctaacagataagggagctccactaccctctttacgagtgaaagttcctcgaaagtctgtcgcactttacacgcctccttcttcaagttttacagcgaccaattgatcaaaatcgacccattcaaatccattctccatttcaattttgattttctttccaaaggtactgactgaagtgacgatcccgtgtatatcccgattgccccactcatgaaacacttcaaaggtggcttgcaatgtatatttgagcgacatatctatattttgtgtaataatctcccactcatcttcatgaatcagtggtttcgttagataatgaacttgagtacgatgctgtataattcgttctttatgttgtggaagcatcatgcggctcgattcccataatccattggcctccagttttttgctcatttgtaatgccccccgattttagatgctcgatcgatcgcttgacccgcagccgtaatggagctcgctcgtagaatggcaatgtcgccaaatcgatccttaatgtcgtccatcacctgatcaatggcccgtttctgctcttgatcatcaaaaaaagatagttgatatgtatccgcgttggataattgagacagggatacgcctacacggcgcacaggttgcccatcccagtgttgatgaaatatgcgtttggctatcttgcatacatcaacggttatgtttgtaggatcagacagtttaacctgcctgtgaaaaccagtggggtggtcaaaatccgctccagacacacttacggacacgacactacccatcagtcccttttggcgggttcttctgcatacttctgtgcagatatcgagaataaccacttcgatctcccaagcctctgtgaaatctctaggcaaggtcattccgtttccgatatctttttgtgtactgtgcgtgttgacggttaccggcgaattgtcgagtccatttgcgactcgccagatgacttctccattaacgccccacttacttcttaatttggaaagaggcgtattcgccaagtctctaatggttcggatgcccatcttccacagatgtttttccattctggagcctatcccccacatatcgcggatgggcttatctccaatatggaggtgtaactcctctttttttaagtggaaaatgcccccctctgcttttttagcgatcatatcgcagcataatttactgatgattttgttttcaccaatgccagctctcgcgtaaacgcctgtttcattatagattttgtcttgaatttgcttggccaaatcgattggatcattaccgaatagatgcatagaccctgtaaaatcagcgaataattcgtctatactgtacggttcgaccagatcagtgaactcctcaataatggacatgatttgagtggatacttcgatgtattcttgcatgtgtggtctcacaatgatcagttcagggcacttctgaagagactgccagagtggttccgcggtagatacacccttcgctttggctagtggacaagcggcaaggataattccagaacgtcttgcggggtctcccgcgacagctaatggtctatttttgtattgaggcaattttgccttttcgactgaagcataaaagctctgcatatcaatgagcataatggttcgttgcttagtcaacactgtaatcactcctgtacttttaagaacgtatgtttgtatatattataaacagaacacatgttccttatgcaagaggtaaatatttatagtagaccacgacgaagtgatggattcaaatcatactaagtcacaccagcttctccagcatttgaactcccacctgtaaacacagttttcattcacaaagttagttaaacaaaaacagccgatcacgttgatcggttgcctccttgttgtttgagctatcgtctcattggtatatttacttttacccggatctacctccggcttcacattccagaagtcaaacaatgcctcatccagcacattacagtgctcacactctaatgatatacattcatcaaatcggcaataaaaccatgtttttgtcccgcgacaaataacaaaagcagccgacatcagctgctgctttcgtagtattttattgttggatgttactccatccgcttacatcacattgtccataatcattatcacccacagcaaccatcgtaccatccgatttcagtccaatcgtatgggcacaccccgctgaaatagctcgaatttcgtgccagccacttacatcgcattggtgatgtttattcgaacccaccgaaaccattgtaccgtcagacttaagaccaacaatatgataactccccgctgcaactgctacaatatcgcgccaactgcttacgtcgcattcaccatcattatttcttcccacagccagtaccgtcccatccgatttgagcccaactgtatgaagataccccgccgaaacagccaatatgtcgccccagtcgtttacgttacattggttatacttattgttaccaactgctgttaccgttccgtctatttttaaaccgactgtatgccagtcacccgttgtgaccgatacaatatcgcgccagctgctcacgttgcattccccttcattatttcgccccaccgcaaccacggtgccatctgatttaaccccaaccgtacggcaccaacctgccgaaacggttacaatatcgcgccattcgcttacattgcattggtcatgcttattccaacctatagcagttaccgtaccatcagatttaagaccaacggtatgtgcattaccggtgttcgtagccatatgaacattacccgctgcaactgcgacgatatggcaccaatcgcttaccttacattgaccatatttattatcacccacagctattactgttccgtcagatttaagagcaacggtatgacgacgacctgccgctatggtacagttacggaaccgtttcgtctcaaaaaccgcttccttccgtgaattgtagtccatatcttcctcctctccaccaattgaaaatcctcgtttagttcaactgtaagtcataaagtttgttgttaaatcgcatgttacaaaagaaaggctcgcacaggcagggtattattacttccctgcccaatacgagcgtctatgtcatattgcactcaaacggttgatccgaatgtgtacttttagcaatcatttcatttcatgtagcgatagtctaatagatccttcaaatttgaaattttcttcaacagcttttctccgacattggtttccctcaccagcttccgcgccagttctttgtccaccaatctttttagagataacacgtccgttccgttacataacacatcttcttttgaattaaatttcttatgggcgacgagctgcatgccaaaggaattgtacaacaaggtatatccggcaatgcccgttgtggattgataggctttggaaaaaccgccgtcaatcacgatcatttttccgtttgctttaacagggctctctccactaatttctttgactggcgtgtgcccgttaatgacatgtccatgatctggattcaaatcaaactcctgcaagattattcgacagatatcttcattttcacgtaaatggtagtaaggattctttctctctttatgtgcttctttatcttggataaaataccgttcaaaagtggtcatttctctctttccaaagagcgaggaacattctcctgtccagatgtaccataccatatccgtcgccagatcttctgtctcttccggatgcgcaaaggcgtaacgtaaataatcttcaaaaacatcaagcaattgacggcccgcatatgtcttgtcttcaatctgcatttcttccatatttccttcttcatccaaaggaatacagccgtggattaacaaattcccgttgtattttaaataaaggctgccctttttcatgagaaaattcatatgtctggccatcttttcggaatgctgaacggaaaacaacagcttttccatcacctggcgttcttcctcaagcaattgttcgggcttctgcggatttacggttgcgaaacaggtgttttccaggtggtacgttttaccgcagatgttgatttcattgttgtcgtaatcaatctgctccagcaaaagtctttcagacatattaaagtatgggcgtctcttgataatcgggctttcaagtttaaactgaatcatggcaatggcttggtgaattttggtgatctgcagaatttcctgctccgatacattatgtccagcctgtaacttaggtctgaaggacggattgtcttcgtaatatttctccgccaggtttagcagtgggcgcagattgattccgtatacatcttcaatgatgtccagattatcgtatctggcgcagattcgaataatattcgcaaggcagaccagagaacctgcgtaggctccgatccagaggacatcatggttcccccactgtatgtctacagaatggtagttgatcagcgtatccataattttatcggggtacggcccccggtcatagatatctccaactacatgaagatggtcaaccaccaggcgctgtgtcgtataagcaaggccgataatgagattgtccgcctggcccaaggatataatttgccgatatatttcctcgtaataaggatccttattgttggtcgaatccgttttgtatagaagctcttctacaatatatacatattgctccggcagagctttacgcaattttgagcgtgtatacttggaagaggcataagaaataagcttaagcatgtgttcaattgttagtctataccactggttcaaagcctgtttattgctcagttcccctataaccagctgtattttttcttccgggtaataaaccaacgccgcaaaatcattgatctcttgatccgtccaaacctcccggaataattctttaattttctctttgacggtacccgaaccgtttcgtagtacatgctgaaaagcctgaaactccccatgcaaatcactgacaaaatgctcggttcccttcgggagattggagatcgcttcaaggttgatgatctctgttataattttttcttccgtatcatatttctcggccaataaatctagaaactgctcatccaaaacagatgtcccccttcaaggaagtatggtgttgtatagccgggtccaaaagctttagaccgatatcaaattacactctatacttggcattgattatatggtaattatcagcatcgccttcccccatcatactccagttcatcatatatgaacaaatttcattgaatggatttgaatgaaccatgtttgtagttattttagtattttacacaatgaaaaataaacgatctattctcagaatttgcttgtttaaattcccaatccccatatgttttaatttttgaaaaaccgatttgtttcagcgactcatcgaattcttcttgatttcgaaacctcagctgcattttttcatgcactaacactttgtctgttttagtattttttacaatttcatagaaagtgtaagtatctccctcaaacccttcatattctgtataaatttctaaaggatctccgcttagtctatctttagctaagtcaggagttttgtccttctcccattcttcccatacttttaccaaagggtttcttgtatcaaaaataaagtgacccccgatttttagggatcggaatacgtctgagattactcgcttccaactatcatctgtaagaaatacctgtgcaacattcgctgtcataattaccacatcataggtattggtttgtaaatccgcactatcacctataatccattccacactttcagaattatctttacttcgcgctatttcaatcgcttcttcattgggatctatggcggtaattttataaccgtactgaacaagatgagtagtccatcttcctgttccacagcccaggtcagctatagattctacttgtaatctctttaacaatgcaaggaaaaattcatcgtcttttccccaatggttaatctggtcatatactaatggaatcataaataatgtctcctcactttcaacagcattatactgtgctcaagagtttgatgtctcgtacataagctatacggttttattttcactctgtgaaccaaaaacttccctggttgcttctataaaagacaacatcattggtgaaagccacttgtctttatgccacaacatctgtgtatatacctgcaagtccggaatttgccaggggaggacaacaagttctccacgttcaacttcagattccgcgacgatctcaggaagaaaggcaataccgattcctgaaattgcacattgtttaatggcttcagcactttgaaactctaaatatgtaatgctatcgatgccctctttctcaaatgaccgatcaaacatcgttcgatagggacaacccttctcatttgtcaggaacacttcatcatgaaaatcttccaattgcagcacagttcgtttggcgagtgggtgatctggagcagctaacaatcggaaatgttcttccagcaaaggttccacggaaagtccactcgagcgaataggttcatccaacatataaacaatatccgtggtcccctcaaagagcgtttgcttgagctcttgattcggaactgagcggaaaattaagcgaactcccggatgctgcgaacgaaaccgttggaagacaggtggaagccgataggagcaaataacctcattcgcacttatcgttaaggttccacttagtttttcattatcatggacagcactacgagcctcgtccattttttcgagaacgccttgggcgtgtgttaaaaagcgtttacccgcagttgtgagcgcgagttgcttgcccaaccgatcaaagaggcgaacacctagctcatcttccaatgctttaatttgcatcgtgacgttggaaggaacgtagctcagcacttctgctgcccgcgtgaaattcaatgtttttgcaaccgtacaaaacgtattcagttgacgcaattccatccaatgatccctccttcatctttcaattttattgaatactatcttgaattctattcacttttattgagagtatcacagctctatactgagtacaagagatcacagtgacatgtggtttttcattttgaagggagcaattatacgatggattatgaaatttttaatttgggtgatgtactcttacaatcaggagtgacgttaccaaacgcttatctcgcttatcaaacttacggaaaattaaatgaacagaaagacaatgttattgtctatccaacggcttttggagatcagcatattcagaatgaatggctcattggcagcgggatggcactggatccagagaaatattttattatcgttcccaatttgctgggcaatgggctctcttcctctcccagtaacacgcctcctccattcgatcgggctaactttccacaggtaaccatctatgacaacgttcgattccagcaacaactgctgaccgaaaaattcggtattgaaaagattgctctcgtcgtcgggtggtcgatgggcggcattcaggcatttcaatggggggcaagttacccggagatggttgaacgaattgcacctttcggaggcatcgccaaaccttggcctcacacatttgtggtcctggaaggcgtgaaagcttcactgctatccgcagtcggcttcgactcaagtaaattaaaccaactaagttctacagacatgcgtgccgttggtcgggtgtatgcgggatggggactatcacatgcattttatagagaagagctataccgtgagatgggatttgacacattggaggattttgtagctggtgtttgggaaaatagctttatgaatatggatccgcataatgttctggctatgttatggacaggacaacatgcagatatcagtgcaaacccctcctataacggagactttgataaagcacttcagagcataaaagcttatgcctgtatcatgccgggaagcacggatctcttctgcacagcggccgataatgaatacgaagctaagcgtatacctaatgctgtcttgaaaccaatccaatcgatctggggccattttgccggtcgtggaatcaacagtgccgataatcaatttattgatgacaatctagaacagttgttgtcacttagcactaatgaatagatcgccacttgcattgggaactcagtgaagagaagcgttgatctttcggagggagagctccccccaagcagtggtgttgttgagtgatgatgtagaaattaaggaaccagcaataatgaagttgaggaccttattccgatgtttcttttgcatcctctgccagtctcatctctatgtctttcatctttaattccaccggataactcactctggttgccattacaaacacacctccaagatgatcttgaaggtgtgtttgattaatacatattcctaatgattataactacaattaagtaagtacagtcatcgcctctcttgtgaatggaaccagatcatcagtacgtccttcttgaattttcttaacccattcagggtcgactagaagagcacggcctacagcaaccagatcaaactcatcattctgaagtcgttgtaccaatccctcgataccaacgttacctgcgcctttaccttctgtgaatagacttgtaaagtcaccatcaagaccaatcgatccaacagttattgtcggtttaccagtcagttttttggtccaaccagcaaaattcagatcagacccttcgaattccggctcccagaaacggcgtgtggaacagtggaagatatcgactccagcttgaaccaacggtgcgagaagctgctccagtaattccggtgtttcagccaatttagcctgataatcatctgtcttccactgagataaacgcagtacaatagggaattccgatcccactactttacggcaagcctcaatcacttcaactgcaaaacgtgtgcgagccatcatatctccaccgtaacgatccgtacgagagttggttttctcatacaggaattggtcgatcagatagccgtgtgctccatggatttcaataccatcgaacccaacgcgtttcgcttctgaggctgcttgtgcgaattcctgaacgattgtagcaatctcagcttccgaataatcattaacatgacctttggctcccatatgccagatctgtggaataattcgaccaccagcttcgtgtacttcagatacaacatgtgcccaaccattcattgcagcttcgccataaaagtgcggcacattggcttgattggatgcatccggatgattaattattgtcccttctgtcacaataagccccactgcgttctctgctctgcggcggtaatagcccgcaacattcgaacccgggataccgtccggagaaaattgacgcgtcatcggcgccatcacgatccgattggataacttcaagtgacctaactctataggttggaacaatgcttctacggattgagaataattcataataacctccacatatttcgttttttttatataaattgacctaggagatgttaaacagcaatcagcctggttaacagctagacgttatttccaaatgaatcaatacacgatttttctcgaaaagccccacctccttcaagctttcgtggtgtattgatccgccttcaattatttttgacttcgtagtcaagaatttcacaaaaaaaagatcaagacatgatcatgccaaatgaagtacgcagaaccgtctcgatctgttcacgggatgaacctgatttctccataactctcacaccaagaatggtgttatttagataagatgcaagctctatactcgtataccggttggaaattaactgttgattctggccactacttatgatcttctctaataccagttgaatctcttctgccatgagctcagcttctagtgtgacctgctcgtcatctgttccgaattcgagtgatgcattcacaattagacacccttggcagctagtttcatcgtctaaaagggaatatcgtaaggtatccagtttatcaacgggagacgaatccagggcttcaatctgtttcagtttcgctataacctgttcacggtaaattgccagcgccttcaggaacaacgatcgcttgtctttaaaaacacagtacaaactttgctttttgactcctgtagtacgcgtaaggtcctcataagaagttgctttgaagccttgattccagaacacttccatagactggtgtaatacacgatcgacatcaaattctcttggtctgctcatgggattaatgtatcagtttttgaccatgtagtcaagaactgatcattttacatctaatctctacggtattttcctgcaggtccattgaatgcggtctaactcttccggtaagcaaccttgtgaaaagcattaatataacgaaacagtgcttcaccatcatcaggcacatgcgtacttgtatccagcggcagcatcattgcctgatacggctctggcaccattctatattgatggacataggaggttaggatgaacccgttgcgttgccagaactgaatgcgctcctgatgagcctccgttgtcccgaactccgcctcgataatcatacctttgatccggtgctcccttaacgcccaggctctgagctgctctagcatccaggtccctatgccccacccacgcaacttctgttcaaccgcgaggtaatcgatgatcaggatgcgctccgcaaccttcccctccagtccagtaacagccatcgcaaccacttctccatgatgcacgcccgtgtgtaaataaccaatcttccggtccagcatactgcgcaaaatcgcttttgtcttagcgccgctttgaaaagcctcatgatagattcgctccatccgcgcccacaatgcttcatcccactcctctatagtcgtaaactctaattccagcatctcattcgcctccagctttaattcagatttatcgtgattcaagatatgtaagagatattccttccggtttaatggattatgatcgtatcttgtacatgaaggcacttcaccatcgaaggcctgatagccataaaatccgggcgggttcgacctcttttttctgcgattctgaagactgtagcatgtctttaatcttaaaagttaaacttatttatttatcgttcgcatacctggcgtatattcacaaaattcatctatcctgctcgttaacgtaatgaagcagccggtctaacacaggcagcttcattttcgtcgtttattcaattataatttctacgttagcgcaacaagcattaacttttaatatcttctttagccttttgtctatatcgaattatggaaagaggtaaattaactactccaagaataaaagaagagccaatagatatccattgagatattgaaggataattcggttttccgtctcctacaggtcctattttgggttggtggctatcccacaaaacatataagagaccaatagcaggtaacaatatgcaaattacacttgcaactatatgtaacacatacttgttcaatcctacccctccatttattttattcatgtctaggacactgtttatattataacgttatctaaaacgggaaattacactaacctactccttagtttaacaaaaaaatttctcctttaagatatttcctaaaatagttttcaataactgttggaaaatttgccgctaaggatttgttgttcatttggatttagagaatggaatgcgaaagtcctaatgaatgaccaaataaaaaatgcttctaataactcgacataattctcttccagttgatttactttgctatacgatgaaataaatactttcctattatcagatgaaagatgcaaatttgagaattgttagttgtggtgtaacaaggcttggaggttagtactcgcctcaatcggtacataaaatgtatgcggaaaccgtcgataagcttgacgagatcgtgtctacggcttcattcgctgtgaacttaatcccatcacatcaagctttggtgcagttggacctactatcattgggttaatgagttatgaattataaaacaaagaaagcagctgatcacttgggtcagctgctttcttattgttatagaaggttttatacatcgttaagaggcatgtaacaaacgaagatgatacaagtgtttatttattgcaaagatttttcgtttgttttcttttagatagagagttatcaagcaacgttgttacgatgccaatcacaagggcaagcgcaccgatccatggaatgtaggtcaacaggttgtggttgacggcgatacccccgacaccagctccggcagccattccaacttgtccaatcgcgctatgcaaactaagtacaatgcctgaagcagcgggagcgagacttataagctggaattggatcggcgtacctgaggaccaggctgctattgcccagaaaataagtaatatatatagaagaaatatggattggcctataaacgggaacaacaataacgcagtggcatggagtatcattccaccagctagtgtacggaatgtaccccatttatctgtactgagtcctcctattttggaaccaatagcactagcgataccaaatataaacagggctaccgttacaccttgatcactcatgctaaatatatcaaggagatacggtgaaatgtacgtaaataaaatggaatatgagcctaaccacacgaacgtaatcagtaacgctgctgcgatacgcggttgcatgatgaatttaaactgatcacgcaaaggaacaacttcttcagcaaccactttggggatgatcagcagcgctaggaataagagaataagtcctattactccaagaccaataaatatgatgttccaatcataatgggaagctacaaccctgcctatgggtacaccgataactaatgccgtactatttcccataataacagtagcaattgaactgccttgctttcctggagcagccaaaaccgcagcaagagtaaggagcgtaacctgaataacaccggcactaagtgctgaaataattctagctacgataagcatctcatatcctgttatcgttgcaattaaaatgttaataacagagaatacagttaatgcataaactaagagtttttttcgatctaatttagatgtgaaagcaattaaaaaaggagtacctacgccaaatgctatagagaacactgtaattagctgtccagcagaagaaactgaaatgttgctagattcagcaattttgtctaggatcccggcaataacatattctgatgcgccattaagaaaactaattacagctaataaatatattttccacatatttttcaacaatttcaccttcttatttctgtatttctagaaaaatagattaattaactattcactaaaataaatattctacattcactcatctgggacaaaaccattttctatataagacccttctattgaattagtagctaaagaccttcccacattaaaacatccgctaatcgaatggttagactcatttgtgtgttccacctttcagtgttaactccgtaagagatttctccatattcagagtaatcctacttatccatctgtaataaattttgttttgcaaaacttatgttacttttattattcaaataaatatatacattttggcgttttagtttgaattaacatgagatcacatttgttactcaaaagtaacgcagtgttttttaatattatgtagaaagaacaatttttttggttttactatgcagcaccatgacaaaaacggcagcgttccagaaataacttggaatcactgccgctattaataacaccaaattaggctttgactgtgtacatcaattctttttcattaattgtggtacgcccagccgattggacatcggtatattgaaccatgttcgtaataatgaccggggtaatcatattgtaacccgctttttcgatctcttcacggtcaaattccatcaatagatcacctacggatacttttgctcctgcctgaatcttgggcgagaaaaattggcctttcagctttaccgtatcaatcccgatgtgaatcagcatctctgcgccaagatcacttacgagaccaatagcgtgaccactcttagaaacagagaatactgtgccgttaactggggaaactgcacgtccttctgaaggttgaatggcaaatcctttacccatcatttcttctgaaaaagcaggatctggaaccaggctaagtggcttaacttccccactcatagggctgaatatttgttcatcctgtaatttagtgtcttcagctactacaggtatagttgcagacgttgctgatggtgcaggtaactcttcctggaagcccagaaaataagtaattacgctagctacaacgaatgcaattaaagcagcaatcagtgcaaagagcaggttgctaatgtctggaccgacatatgaggcagctcccggaagacctacagtgctaatgaaataggctttaacagaaaaggttcccagaaacgccccagcgactgcgcccccaatgagcgctgcaataaatggttttttgaatttcatgttaattccgtacatggcaggctccgtaattcccataagagcggtcagtcctgtagaatatgaaagtgatttggtttgggtgtttttagacttgaagcccacaccaaatgcagcaccaccctgggccatattagctgcgaacattaacggaacgataaaatcgtaaccaagtgttgcaatcgaaccaactgcaagcggcaacagtgcataatgcatgcctgtaataatcagcacagacattgtgccaccaatcaagatacttgccaaaatggatgcgttatcaaataaccatctgatacccccagataaaccgtttccaataatgccacccagtggcccgatcgcgatcaaggttagtggtaccatgatgagtaacgtaacagttggtacaacaatcagtttcagtgaagaatgagtgatgcggtcaatcgctctctccacgtaagcagcgatccagattgcaatgacgatgggaataaccgatgatgcataggatgtggcaataaccgtaatgcctgcaaacgaagtattaccctcttgaagcaacgctgtaatggttggatgcatgagaccagtcgctagtgcagcacctacataaacattgctccccattttcttcgcagcactaatggctagaataatgggcaggaagtagaatgctccatcgccaaccgcagacaaaatgatataggttgaacttgtatttgtcatccaaccaagagccaccagaatggacacgatccctttgatcatacctgcgccagcaattgctggcaggattggcgtgaacatgcccgatatgaaatcaaataatgcgctgatcggattcctttgtttctttccgccttttggagcactctctgcgttaggcttcatgctcatattgttcactagtgctttgtacacttcggaaacttcactgccaataatcacctgaaactgtccaccgttttccgttacacccataacgccaggtgtgttttttaacgttgttctgtctgcttgattgttatcgtttagattgaatctgagtcgagtcatacagtgcgtaacttgatcgatattctcttccccaccaaccagtttgagaatatctttggacaattgttgtttatccatgatgtaaggctccttcgacgtatattaaggtagtaaagctaaatttttgaggatggcaaaacaaactcattatgttttcatatgacagctattgtgacattctcaagcagactaaggaagctcaacaagcttgaaactggaactagttaagggtaggttggtttattcgttgccaccttcgttctctgaccatggacgcgttagccagttataatggaagtgcgaaacatatgttataacgtcatgttactcagaacagagaagaaaatatatattgtttaagtgtttagtttcctttgacacgaaatgatttttgtaacaaaaatgtaacgcgttgttttttgggcataggtaatgtatactgcctaagcaggttacctattatttttattatggtctaagggagtgtatatccatgttcaccagtgaacaaatctcatcctataatgaattggaactatctttatataactatatttctcagaacatggaaaaagtggcgtacatgcggattagagagctggccgatgaaactcatgtatctacagccaccattatgcgattttgcagaaagaatcaatgtgagggattttcggaatttaaagtaaaacttaagatgctcatttcccaaaagggtaaactaacgaagcaggagttaaaaagtccacatcatgctgtgtatgagttttttgaacgttctcaatctcctgaattggaggaaaaaattcaaacggcagcaaagttaattgctaaagccagtagcgtcatttttattggtatcgggagctctggaataatgggtgagtatggagcccgatttttctcaaatctagggatatgctccgtgtacataaaagatcctcattatcctgttcatatcaaaatgcaaaaagacagcgttacgattgcattatctacgcgaggtgaaaacccgtatgttctaccttatctccaacggatcaagcaggagcaaaataaaattgtggcgataacaaacaatcgccaatccaccatggctaaaatatcagatgtgaatatcccttattatgtaaaagaagagtattatgaatccactaacatcaccactcaggttcctgttactttcctgttggaatggctgggacgagaggttttcaaagaaatggtaaatacagaattagagctatgagagagaacccgatctttttataaacacgcaccagaaagagagccctctaggctctcttttcagtcttaatgactctctatgggatgactacgttagacgctttccattactttttttcctcgtgttgctgcaatttgcgtcataatcattagaatgatgatcacaatcattccaatcatagcaggtgtgaaactattggaagcatcatgaatccaacctagcaatattggacccatcgctccaataacatacccggcagattgctgcatcgctgaccaggaagttgcatcgttcacattggttgtagaatcaatcggtaacatcaggtttaaagtgaacaagccccctgctccaactccaaagagtacaacggaaaccatcggtatgaaattcatcatcaataaaatcaaaccaacaatcatgaacagagattcaccaaccatccatactcttcttgaaggaaagttcttcaataatacaggaagtacaaaactaattgggatttggatgacaacaaatatggtcagacaaagcgttgcataggatttgctataccccatttcctgaatcattaacgggagccacgctgtaaaagaataaaacaacatagccattaatccaaatgaaagcgtaagcgtccatgcgcttctatttccccagggaagtttaatttgcggacgttcttttcgttcactcacatgagcagattcagatcgcggcttcaccatgatccaccaaatgatcgctgctacaaaggcaattaatgcccaccctcctaccgctgtctgccaagaattgaagtatgcctctaagggaatggataccattgaactaactgcagcccctacagtgatcgcaatactatagagtgcaatcatggatggaacatgatcgggaaaatactttttaataaaacctgaagttaacgggccaatcgaagcgattccgatacctacgattaatgcagataaaagtaaaacgaacgtagactgtgtaaatagccgagtggctattccgattcccaccacaatcagggaatatccaatgattcgttctattccccatttcccacttgctttgacggcaaaaggtgaaaatacgcccatacatagtacaggtattgaagttagcaaactggctagtgcagcactcatccccaaatcttcccgaatcgtatctaacagcggagatatggaattaatagctgggcgcaaattcaatgtagcaacaaataacgcaataattaaaaatattttttttctcatcttctactcccattagtgcctatcactattctcgaaacaaactgttcccgttggtctgaatgacatccttataccagtggaaggacttcttacgatagcgttccaatgttcctgaaccatcatcatgacgatccacatagatgaatccgtaccgttttttcatctctgcagttgttgcactaaccaagtcaatacaaccccatgatgcatatcccatcaattcaacaccatcttggatggcttcagcgacttgaagcaagtgctccttcaaataattgatgcgataatcatcaataactgttttgtggccatgctcgtccgtgatcagttcatctacggctcctaatccattttcaacgatgaataatggtttctgataacggtcatacatcgcattcatgatgtacctcaggccttgggggtcgatctgccaaccccattcactcgcgcccaagagcggatttggaacacccccaatcaggtttccctctcctttaatttgcttggcaggatcagccgtttcacaacaactttgataatagctaaaggaaataaagtcaacggtgtttttcaatatttcttcgtcgccaggttcaaaatgaatggtaattccgttatctttcaaataacgtttcatgtagcctgggtagtaaccacgcacatggacatccgtgaaacctgtattcttatgatcagcttccatcactttgatcatatcattagggtcaggagtcaatgggtaaatcggcatagcaatgaccatacaaccaattttgaaatcagggttaatttcatgccctattttaaccgccagagcacttgcaacaaactcgtggtgaaccgcttggtacagatcctgtttgctaagttgatccgcatgcgtgttaatcccgccgcccacaaacgggtgttccaaaatagaattaatctcgttaaatgtaagccaatacttcactttgtctttatatctgtcgaaaatggctcgcacataccgttcatagaaaccgatcatttttcgattcgcccagccatcatattccctaacgagatgtagaggagtctcataatgagagatcgtaactagaggttcaattccgtatttccggcactcgtcaaaaaggttgtcgtaaaattggaggcctttttcgtttggctcaagttcatcccctttggggaagattctggaccaggcgatagacgtgcggaaaactttgaaacccatttcggcaaggagtttaatgtcctccttgtatcgatgatagaagtcaattgcgattaacttcatattctcctctgttggttctgttgttggaggtgtctgaatgccgtgcggcatgatatccgaaatggatagtcctttcccgtcctctagatatgcaccctcaatttggttcgcagagacggaaccgccccacaaaaaaccattaggaaattgaaatgtttgactcatttagtaagcccacctttcttttaaaccttcagctgatctggataaaaaacgaatcccgctttatcggtttttttatcatgtatttgtttgcacaacttatgctacatagattaattcataaaatatatgttatttcgtatttagttcaaggtatcacagattcacatttgtaacataaaagtaacacagtgttttaaaggattactgcatgttagctcaagggtaactgtacttctaacacgccatcataatagtcaacaaaataaaaaaagccgtcaaaatgacgacttcatcatgtaagttatccattagaagtggcaggctgaagtgtttccagcagtatcttaatctcttcatcatattccagttggaataaaggaatgacctcatctaatctttgctggtacaattccggatcctggacacgaagcgctgctcttaattccatttcttcttctgaaccattgtcgttcagaatcatgttcaggacatccactttgaaatattcacttggaggaaggatcaaggcattcatcaggaattgcataaaaaagagatggttatctttttcctgatccgcttttttcatcgcttgcttcgtaaataagttgatatatttctgagcaaaatctactcctttcagttcataaggctcaccatgttctacccctctccaacgcaggtcagccacggaactaagccaccaagccggatcgatggcctgctgcatacgcagcaatacgttctgttcaaacttcggatcgggatgcaagcgctgtgcttccaaagactttcctatagtctcagcttcgatcgcagcaacggtgatgccttgtccatgaattggatcaaagctgcaaaatgcatcaccaaggacaagtaatccagatggccaaccttccatgagttcaaaatgctgacgaacagactcggatatacggtatccgcgcggaccttgcacaggctccaaacgttccatcaactccacaattttatctgaagcaaacaaatgtttgagttgttcttgaaactcctctggctgagttgaaggatattcatctcctcctgcgttaaaaagaatgagtccagcgatatcatcctcaatgcgcgtaaatatgcctgcacgaataccttgctcaggatctgaatcagacatcacccattcgtttggaatagaggatttaattttgtaatagcgggtgctgtaaccaagagataccttcaacacctccggttccggtacagacaatccgatctgttcaagccatctgattaatttggaagaacgtcctgaggcatcaataaccatatcagctgggaattgtttttcacacttttccccgcgtctttcttttgtataaatgcctgtaatggaacgcttatcctcagacaccagtagccccgtaacttccgtattcgttaagaagcttatatgagagatttcctggattcgctttcgtagtacccattccatcaaggctctgctgcttgatgcaattttaaatgaagaaggatcctccttattaactaatgtaccgtatttattggtaaccacaagcttctcttcgtgtgaagagatggcgcctaatgcaatcaattcttcattgtatcctgggaagtaatgttccataatcagcccaccacgtggttgtacacggtgtggatgaaaagattgaggcacaccctgccggttatttggctccgaagggaattcatccctctcaatcacacatacttcctcataataatcggctaacattcttgcagtaattaatccagcaatccctgctccgatcaccacaacttttttcatgtcagacactgaagattcatcctttctagaaattagattttaatctacacttgtagatcaatcaaaatattacttataataccaatatataatcaaaatttcttttatagtaagaatcaatatagcgatggcatatagttaaactacgatatggaagtggtgtagatgaaaatcaatgaaaaaaagcttgatttaagagttgccaggactcataaattgttaattacggcctttagagatctgttatctgagcaaggcaaactattcagcaatatcacgattaatgagatatgtgataaagcgatggttcaccgtacaacgttttacaaacattttgaggataaatttgcgctgttatccgctaccctcacgtgggttcttcaggattatttacaaatgagtatagaagatcggcttcggcagcccttgcaaagcctatctagattcatgttggagaatttactggagccgattgttcaaaaccagaagaatgacaagggatttactgactttttcaaaaactatatcggagatatatccagaagagattttctggaattaaaaagaagaggtaaaccattttcacctcccatagaactcttagccgaatatcattcaggggtcattagtttacttgtgacgtggtggatatatcatcttgaagaagatgttaatgcagaacagatggatgagtattactatcaaatggttaacgagaaaatcatgttagattagcatgaagctcactctacgcgatgtacctagccaagttatccagcctgacctattttcaccaccagaataagaaggtatcttattgttgagataaaataaaaaccgatgggcattttacttatgtaaagtcccatcggtttctttagttttaggatagttcggttgaaggccacagatgctgtgaatctaaaatataagtcgataaaattatgtctactgatcaaaaaaatgggttactatgtagcaaactagcaatggttgcttaccagaggcctatgaagtaacaaccacctatattcatcttacgagttatattcattgtaaacatcttcagtcgtctgcacgttcttcagatacacgatctgccctgactcgttcacacgcataatatctatacccgccttcgcatacaccgtgccatctactgcttgcccgcatactgcccagttagttcgataactgccgtcgggctgaagaacccatgcatcccacatatgtttaatgtctttattgtattcataaaaagtcttaataaccacctcgaatcctgtacgactgctaccgtttgaaacaatttcagcattctgcgtgaacagggataacaagtccttcatagctcgatcgtcagtgcgagatgcatcaaacaagcgaaaataattatttaacatcgtgatgtttgcatcggtgttcagagagttggtagtattgccagcggtaaggccataaatctatccttttcaaattaaaaattcagatctgttaatacttgttgattaccaaaactcttcttaaactctgaagtaccaatttcatttcattcggggtcattgaacagtgcatacggggggcgtgactaggcggaaagttgtgactgtgaatgtcttctcttcagtgaagaaatctcgtttggtagtgaaatgtaaaaacttcataaattccttcgtttttatacgactccttcttcatttgcgtcctgtagtatgtcttacatcgggataacgaaggagcacaacgaatgaagaaaacgatgatgttaaccttactcatagtcattacggcaggaatgatctggttcaactgggggcttgttaggacaggtcagaatcagccggactctacatttggcaccagcggctggcaggaaaataggcttattgcacatgcatttggtggagttaacggggctagctacaccaattcttatgaggcgtttataaccaattacaatagagggtaccgtttgttcgaggttgatctggtgcagacgacggacgggaaacttgtagccagacatgattggtcgcagaagctacagccggatttggccactcatcgcggacgaaacgtaacaaagcttcagtttgcaaactcgcttattatgggaagattccgccctcttaccctgccggacatactgcagatgatgaagcaatatcctgatttttacttaattgtggatacgaaagcaggcagcaaagagcaaattcagcagcagtttgcgcatctagtcaatgaggttcgacgtacggatcctgcactgctcaaccggattatacctgaaattttcagcccggaaatgtatgacacggttatgggaatccacccctttccaaacaaaatatattcactttacaaaactggcgcctccgccgaaagtattgtagaattcgtaagggacaaacaactgacagcggtcgccatgcctgtataccgtgtgtatctaaaccccaatttagttccaacactacataagtttggggtaaaaagctatgttcacaccgtcaacagcagaccggttatgcagattctgtccaggttcggggtgcatggattttacacggatcaggaaaaatcaccagaggagctgatgcttgcagacgctccccccggccatgttgaattttcggaatacatgagttccggattagtaaatataagaaatatcgtgatgaaggtgagaaataatggctataaataacattcttgttgtagacgatgaaccggaaattcgagaagcgctcgttatttatttgaaaagcgaagatgtggatgtattaactgcctctaacggattggaagcgctggaaattcttgaacaagaaaccattcatcttattatcatggacaacatgatgccacagctcgatggaattaaaacgacatttaaaattcgtgaaaacaaaaatataccgatcattatgctttccgccaagtcagaagatagcgacaagattttgggactcaacgttggggctgatgactatattacgaagccgttcaatcctctagagctgatcgctagagtccgatctcagctgcgccggtttacgaatttaggttccttccagtcaaacggggatgagctcattcaagtaagaggactcgtgctgaacaaaagctcgaagactgttgagatagatggagaggacgtcagattgaccccgaaagaatacaaaattttggagctgctgatggagaacaagggcagagttttctcaatcgaagagatttatgagcgcgtgtggaatgaactgatcttcacttcagagaatacggttgccgtacatgtgagaaacattcgtgaaaaaattgaaatcaatcccaaagacccaaaatatttaaaggtggtatggggaattggatacaaaattgagaaaaaataaagccgatcggaaggttccaattgaccttattgtcatcattgtcgccgcgattttatggagcctcgtactcataaacaggtattcatacacggggttgagtctgagctattcaacttcaagttacatccagacactgcttgccattattattctttgcctgctggcaagcagactgtttctttattttaaggcaccccatagtagtcgttccttctggcatggcagtctgctgatggattactttcatatttggagaaccggtcttagagccagtttacaaaactggagactaacgtttggcctcatcatgatgcttttgctaaccgcgatggccggcatttgtatttggcaggcagtcacatattacggacaggggtggcttctactttatttgttgctctacgtgttgttcttggttccatatatactttccaagcttagaagattcatcgccattatcaacgggagcaaagagattgccgaagggaacattcagaacacaattcaggataccggcaaggatgatctatccaagcttgctggctatattaacaatatgaaagccgggtatcaaagcgcgctggagaatcagatgaagagcgaacggttaaaaacagagctgattaccaacgtatcgcatgatttgaagaccccacttacttctattatcaactatgttgatttattaaaaaaagaaaatctgtctacagagaccacccgatcctatattgaaaccctggaccggaaggcgctacggatgaagctgttgattgaagacctgttcgaaatctcaaagatggccagcggtacagtagagctggatattgagtacgtcgatgtcgcgacattgttgacacaggcgattgccgagtccaacaccagtatgggacaagcgtcgcctgtgattcgggagaggattgcgaaattcccgatccatgcacatttggacggcaataaaatttggcgtgtattcgaaaatttaattggtaacgcgcagaaatattcgcttccgggaaccagaatctatatttatttggacgagtctgatgatctggtgctattcaaaattcaaaatactgctgcttatgagattgattttgctgcggaagagttgttcgaacgtttcaaaagagcagatgaatcccgccagacagaaggctccggcctagggctgtccattgtgaaaagtatcgttgagctgcacggcggggagatcaaaatcgaaattcatggtgatcaattcaacgttattctgcatttgcccaagcagcgcttaatttaaaagtcctaaaactacgttaaccctcaatgctccttttcaggagtatgagggttaacttttcatttttatcaggtattaaaggtgaatcgtatgaatggcttaccaacatcgattcctaaatattagtccaaaaggctgtagatctgaatgctctccaccttggcatccttgatatggaacgacatcacatccacataattggatggctcgtaacggaagtcatcctcctcattaggggctccatcaccaagcagtttcccctcagggtaggcgtttttgagtgtatccaggctatctcctgctttaatgtttcgcactgtcgcgtacttaggatctgtgatttcgatatgaaagatggagtcttgttttccctctggtatactgattgttttaatctccagaccaggatacgtatagaccttttctgtaaaaccgattaacgtatccatgttggttccatcgtcggcactgtacgtatgagatttcaggttatccggtttgcccagcatcttttccatctgatcttcattcgctgtatccgaaatcgcaatggtgtgctcattatagacaaaagcaagctccttcagcaccacattaccttccttctccatcgaaccttctttaatagcttcagtacccttttcttccgaactttcggaagcaggcgcaggagaattggttgctccttcgcctttgctctgttcattcgctgtgttctgtccggttgctgggggcgtagcatcattggactgacagcccgctaatgccaccgttagtagagcacctagtacgataacacctgttgctttgtttatcaatttcatcatgatccctccataaatgtgtgatttgttcttatgaagtgattataaataaaacatttgttagtctcataacagaaatgtaccaatcttgtaacgttaattatttacccgcgtgtttccgcacggggcaacacaatcgtaacggttgttccttccccgatttgactttccatgtcaatataaccattaaaccgctcgacaatctccttgcaaatagaaagcccaagacctgaaccgttcgctgtgctagcatttttggcccggtaaaaacgttcctgcactcgctccagctcctcgcccgagataccgataccttgatcacgtatccgtataactacctcgcttggcgtatgttccaaatttaattcgatcagcgatggactgccggaatatttgatggcattgtccacaacgttggcgattgcatgggacatcagcattggattcacgttggcgtaaactcttgttttaccctcatcatccggttcttcctccgcctgactaactctgatctctatccctttatccttagccttggcacccatactcattgcaacttgctgaatcagttcgttcatctccgttttctcgacttccagttcgttagaaccagccttgtcgaatcgggataacaacaacagttcattaatcaaacgtgtcagccgatctgattcctgcagcaggtgagcatagattttttgcaactccttgtcctcgttctccccttcaaccaagtactgagagaaaccacgaatggctgccaagggtgtttttaactcgtgagatacgttggagacaaattgtttctggtactgaatgtaatcatgaagctgccgccccatggaatccagtccatctgccagcatgcccagttcatccttccggttgagatgaactctccgaaactcctgtctagagaaactttgcgcagcgctaagcaacagtttaatcggcttggttgtgttgcgggcaatccacaggctggataaggtaatcagcacaataaatccgcctgcacccgcaaacaggatataacggatttgatccataatcgcataaaagtaggaaatgtcctccacgaactcatacacataagcgttctcgtagaattgatcctgaatgggcgtcgcgaaataaagcagatgatcttccgttacggtgtaggcataactgccgctcagggctttctcaatattcttttcgaaaataagaggtttgccatcattaatgatgatgccatccacagccaagcccagcaactgcttggagctgtcatagatacgtacttccttgcctgaagctttcagcttctccagagcaagtctgacaatttccttggtctgggcctctcctgaagatgacctatgctgtgataacacctcacggaaggacaactcggacagatccgccttctccatcatctgtttctcaatggtaatgaagctgtagtaatcgatggctttattcaccgcaaaaatgatgatgccaaaggacagcacggagaaaaataaataattcagcagtaaccgggttgcatacttcaggcctcgccacctccaagttgatagccaaatccatagatcgtcctgacatacttcggttcgtccgcgttatcctccagcttcttccgtaaccgcatgatggtcatatccacactgcgactgtctcccataaagtcatatccccatccgatctgcagcagctcatcccgggtaaagattttgtctggccttttgagtaacgtttccagaattttaaactctttggccgttaaagacacgggtacatcgttttttagcaccctgcggctttccagatcaaatgtcagttcttcatgaatgatgcgtgtagatttcacttctgttccttcacttgattcctccttgctctcgtttcttctcagaatgaccttgatccgagcgagcaattcacggttgtcaaagggtttggtcatgtaatcttccgcccctagctctagtcccaacaccttgtcgattacctcgttcttggcagagagcatgatcacaggaacggcacgtttcccggtgatttccttgcacaggtcatatccggagcagtcaggcagcattaaatcaagcaccactatatcgggttgaaaagagtcgagcagctgcaagcccgttttgccgtcctctgcggtctgcacatcgtagttttctcgccttagcaccagctcaattaaatctcgaattgcgatttcatcatcaatgactaggattttcttcaactgtacacccctatctagccttgttttcaccagcttcaatcaactattaacccatcttagcacagacactttagattcctccaccaactggaaggtgaggtatattccactcagcccaacataacttgtaataaactcgaagaaaggagaacaatccatggatctgctttgggtactcattgttggtggacttattggctggttaagcggcaacttgattgggcgggacgtaccgggcggtgtacttgggaacattattgcgggttttgcggagccttccgaagacgttaacatagagaggcggaaaccgatcccgtcgttcattagtatgggataaacataaaaggaccgaaagcattcatcgatggaagatgaacacttacggtcctttttttatttttgtaccgatttcatccattgtcgtgttttcggaagattggtttttggcagttatcatcccctgagccaaaagacacatccaccatcctcttcatttcttttctaaagtgctttgactagtttgttttatctaattcaagcccgccgtttatcttgcttcttatgtttcgtcatgttgttcagaagatactaagcgatgagctgagacaagttgtccggcggcatccttaccccaaactgaaatttgaacttgttgttctgctaaaccgctcgttgtaaagacaaattcaaaagaattaaaatctgcataataatttttggttaggacttgattaggatttatagaaactaactcaagtacatatagtgttcttgttccattcaaataataaccttgaatcaggatattcgagccatcgactaagttgcgattatctattttgatcgtcaactgttgtgtcggtcttacattatctacaggattattttctatcggtccggtggataaaatcattctctcttaccccttcccaacatctattgtgcatcattatgacctgaggttttaccagctctcagcaactctaaataccacatcaactatatttgagcctgccccaccaatatttgatacagctaatgttacgacctgattttcaggaagcgtgaagtccaatagttctgatgaagctaatattctggcaacacctgttccgcctcctgtaacaccttgaaacactacttctcctccggtaatcgttgtagacgaattgtttaccaacaaagctgtttcactatcgggaatgatcgttgtagctgttggataattaataaatgctccatcgagaattccacccacaagtacttgataactaagatctacggatgagataatgtttatttcttctagatcgacctgaacagagttcgttctagctgatcccgaagggaagattgcttttcttgtaaatgatagtacgggtgttagtgctgatgtgagattggtaaccctcctcctttccgaagtgactctaaaggtgggattatattttccgataatactatattgtcttcctccaacaaaaagggtataggtttcggcagttccgttattatcaatttgtgctcttatgggaagattggggtcaataaaactcgtttgacctgttggggagaatcggtggacggtaattacctcttgcgctaaagtcgacggattaggaatgaccactctaaattcgattactccatacccataccaagtaaatacgatttgaaatatattccctttagatagatttagtgtcgctccgcttaatccagtaccatccaatgggtccacattccatgaactttgaggaaaagttgtatcggagcctcctcgccgtatggccacgaatacatttgtgctatccactccaaaaaaagccccgttctgatcgtcaaagaatccccatcttccaatctgattacctatcggcagcataggtattcgaacgccgattccggcttctcctgcgaatcctggctcgtatctacctcgtaatacactttctagaatggctgaatctattccgttagtggtattgcttagattaaattccgttgcatcattggtaaccgtaccatccccaatggttgtaacggaatctcttagaatggatagaccatatgcagatgttaactccacaattggggttttttccgatacaattagctcatcgtattgcgaacttatattgggacccacatttgagattataatatccgacaagttagttcctccttcgcaggaagggaaaagtgaattccctccttctcctattactttttaccattcttcagtaagactgaaggtggccgtaacaggattagtccccccgcttaaattcgctacggctaaagtcacaatttcagagtcaggtaattggaaatccaataatgaagctgaagctgatattctgacacttcccgcaactccggctactaagccttgtaataggacttgaccatccgcaattgtcgttagtgtgttgttaattagaagagctgtttccgaagttggaatattagtcgttgctgttggaaagtttacgaagcctccattaatcgttccgcctaatatgatctgataataaatatcatcagtagttataagatcaatattttctaatttgacactcactgaatttgccctacctgaacctggcgggaaggatgtctttctctggaaagacaaaattggtgtgagtgaccctgttgcagttacagttctcctttcggaagtaaccctgaaaacgggattatatttacccaatatactgtattgtcttcctccaacgaataaattgagttctgattctgtgccattattaaagatttccgcacgtagcggaagattaggatcggccagactggtttgcccattgggggaaaagcgatgaacgataattacttcttgtgctaaagttgaaggatcagggatgacgactctaaattcgattactccatacccgtaccatgtaaatacgatttgaaatatattccctgtagataaactaagcgttgcgccactcggacctgttccatctaatttatccacattccaagatgcttgaggaataatagtgtcaacacctgctcttctgatcgctacaaatattccattcactacgctctgcccaaagaataagccgttctgatcgtcaaaagcgccccatctgaccacttgggcccctgtcggtggagccggcaatcgaactcctattcctatttctcccgctaaacctgattcataccttcctctctccgagctttgaagaatagcaatgtcagatccggatatagttgtagttaattgaaattccgtattattacttcccactgtagcatcgcccaatgttaaaacaatgtctcttaggttggataagccatatacagaagtcaactcaataatcggcgttttttcgttggttcttaattcgttaaattgagagctgacatttggtcctactcccacgatggtcgcattaggctcaatcgtacctggggctcccgtcgctcctgtgactcctgtagcccctgtagccccagtggctcctatggctcctgtagctcccgttgttcctgtgggtcctgttacttcatttgcgcctagcaattctgaagatacaatgcgatggggaattacaagttgcccctctacattttttccccaaaccgagattcccatctgatcttctgctaaaccgctcgttgtaaagacaaattcaaaagcattaaagttcccatcataattcttcgttattacttcatttggattcacattaatgagttcgtttacgtataagtttcgagctccgtctagataatatccttgaatcaagatatcggcactattaattaaatctcggttatccattttaattgtcagttgctgcgttggccttacaccactgaccggattattctcaatcggtccggttgataaaatagccataaaattttattctccttttttccaaaatgattagaggtagaaatattcatccacctccacccctttggttttaaactaacaaaaatttaggcgctcatcttccactccgctactgaacctgaataatcgaaacagaaccatctgtaagtgtagctgttgccgatccattataaagaaaatcgattgtaagcgcagttgaagtagcatcagctaaaaacgtacccgatacacttacattcgcatctaaagttcctgtaactgctctccctgaaaaccgactttgaaatacgaggttagttcttggtgtgaccgtaacgttcccaactacagaactcgttgctctaaatgtatacgaaaccaaataaatgtggcctattgccagtacaaaggttgtacttgtaggatgcaatatgttagtgccattaataaatacggtcgtatacgaaatagctgtcgcatttacaacagaaggtacactaacattaaataacccattttgtattgtggcatttgccccggttgcacctgtgctccctgtggctccagttgagcccgttgcacctgttgccccacttgtgcctgtttgcccagtcgcacctgagatccccgttgccccagttatgcccgttgtgcctgagatgcctgtggctccggttacccccgttgcacctgtccctccggttgcgcctgagatgcccgtggctccggttacgcccgttgccccagtctccccggttgcgcctgagatgcctgtggctccggttacaccggttgccccagtctcgccggttgcgcctgagatgcccgtggctccggttacccccgttgccccagtctcgccggttacaccagtgatgcccgtggctccagttatacctgtttcaccagtctcacccgttgcgcccgtgatgcccgtggctccggttacccccgttgccccagtctcgccggttacaccagtgatgcccgtggctcccgttacgcccgttgcaccagtctccccggttgcacccgtgatgcccgtggctcccgttacgcccgttgcaccagtctccccggttgcacccgtgattcccgttgcaccagttacccccgttgtaccagtctccccggttgcacccgtgatgcctgtggctcccgttacgcccgttgcaccagtctccccggttgcacccgtgatgcctgtggctcccgttacccccgttgcaccggtctccccggttgcacccgtgatgcctgtggctccggttacacccgtggccccagtctcgcccgttgcacccgtgatgcctgtcgctcccgttacccccgttgcaccagtctccccggttgcacccgtgatgcctgtggctccggttacgccggttgcaccggtctcgccggttacgccagtgatgcccgtggctccagttacaccggtagcaccagtctcgccggttacgccagtgatgcccgtggctccagttacaccggtagccccagtctcgccggttacgccagtgatgcccgtggctccagttacgccggtagccccagtctcgccggttacgcccgtgatgcctgtggctccggttacgcccgttgccccagtctcgccggttgcacccgtgatgcctgtggctcccgttacgccggttgtaccagtctcgccggttacgccagtgatgcccgtggctccggttgccccagttgccccagtctcgccggttgcacccgtgatgcctgtggctcccgttacgccggttgtaccagtctcgccggttacgccagtgatgcccgtagctccggttacgccggttgcacctgtgttccccgtggccccagttacgcccgttgtgcctgtttcacccgtggccccagttacgcccgttgtgcctgtttcacccgtggctcctccagcggggccagtaatccctgtggctccagttacgccagttgcacctgtttcaccggttggacctgtggtacccgtagctccagttacgcccgttgcacctgtctctccagttgtacctgtgatgcctgtggctccacttgcacccgttggacctgttgcacctgttgtccctgtctccccggttgcacctgtggtccccatagctccagttacgcccgttgccccagtctcaccggttacgcctgtggctccattggcttctaacaattctgaagatacgatacggtgaggcgttacgagttgtcccgtggagttttttccccaaactgaaatttctacttgttgttctgctaaaccgctcgttgtaaagacaaattcaaatacgtctaggtttgcaaaataatctttttttatggcttgatttggatttacgctaattaattcgagtatatattccgttctagtcccgtttaggtaataaccctgaattaaaacaattgcattcgtaaccgtatttctattatcaatattaatggtcaactgttgtgttggtcttacaccgctaacgggattattctcgatcggcccagttgataaaatggccatttatcccccccccccccctttctttacgtttttaggaacaggagagaaatctgcattccttatatcctaagccgtctctaactcctatagaccgacaatttcaacggcttggtcatcctcttctctgtgccacatatttgtatccattcatggtgtacttttattttttcattaaagtgaactacttgactctggaaagcacttgtaccttttctttacaacaaaaaaagtcgtaaaatagcgactttaaagggtattcgttcttttacatcgacctgaaccgttcgctgtgcttgcatttttcgcccggtaaaaacgttcctgcactctctccagctcatcgctcgcgataccgataccttgatcacgtatccgtagaactatctcgcttgtcgtatgtttcaacttcaattcgattagcgatggactgcctgaatatttgatggcattgtccacaaggttggcgatcgcatgggacatcagcattggattcacgttggcgtggactttcgtcagaagcttatcctccgatttcgcttcatcctccctgaacataatctcgattcctttatctttggccttggcacccatactcgttgcgacttgctgaatcagttcgttcatttctgtcttctcgacttccagttcgttagaaccagccttgtcgaatcgggatagcaacaacagttcattaatcaaacgtgtcagccgatccgattcctgcacgattatgcgaataatgctaacaatgagattgtgcagctgcgtaatgatttaatgaaatttttaagtcaaaatgatatcaaatcggaaatacatgttcagtaatttttctgcagggctgattagagcagtctctatgaaagcatcaaatcaagcaccaccagatccggcccaaaagtatccagcagctgcaaggctattttaccgttctcagccgtttgaacgacttagttttctcttctcagtacaagctcaattaaatctctgattgcgatttcatcgtatattccaatcagcccaacataacttgtaatactcgaagaaaggagaacaatccatggatctgctctgggtactcattgttggtggatttaggtgtactcgggaacattattgcgggttttgcggagccttccgaagacgttaacatagagaggcggaaaccgatcccgtcgttcattagtacaggataaacataaaaggaccgaaagcattcatcgatggaagatgaacacttacggtccttttttaaaatgtaatgacgattttacctacagcgtggtgagtttcactcaaagcatgtgcatcataaatcccctgtctactaaacgggaatgttgcccctacaattgactttatcttgttctcttccatcagatctgccattctctgcaattgatcaccatctggctgtagccaaatcccctttgctaatacattgtgagacttagcagtatcatgattgggttcaccaacaatggtaatcagtcttccggtatttggcttaagcaccttatagctattctcagctacttctccacccatcgtgtcaaacactaaatctatatcttttagaatttcttcaaaattttcctttttgtaatcaatcacctgatcagcacctaacgaataaagaagttcatgatttttttcacttgctgttgtaataacatgagcgccggcatgctttgctaattgaatggcatacatacctacaccaccagctccagcgtgaataagtacagtttcaccttcttttagatcgccatgagtaaacagtacctgccatgctgttaaaccagccaaaggtacagccgcagcctcctcatatgagattgaatcaggtagttttgccagaaggtgctcatcaactgctgtatattcagcatacgaaccgaaacgtgttgtatcaggacgactgaatactcgatctccaactttccatttgctaacgtttgaaccaatttcagttatgaccccagctacatcccaccctaagataataggaaattcccaatcatacatttcttttaagtaaccctctcttaatttccaatcgattggattaatggatgtagcctctaattttacaaccacttgattggcttctgccctcggtttattcacttcctgctcaactaactcttctttacttccatattgattaatcacaactgctttcatttttgtatcactcctctaagctaatagccttttacgtgctattcctgattatttatttgtatctagtcactggggttcatgcatattatccttactcatttttaaacaaccaggataaaattatgcaaaagctttagggattttgagttgtgtacaccaacaaataaacgattttaacgaaattatttatggacgccgctccattaagatatacgattcatccgtaaaaatcagcagggaagaaatgactcaaatcatcaatgaagctagcactgccccttcctgaatcagtaaagaagaagttgcaatgatgaccgacatgcttactcgcatgcaatataatctgaaggatctgtaaatttacgatgacagtcagccttcttcagatttcttttcataaatgaataaaactagttagatgagatgatacaatatctcagattaacaagagaatatagaccatatattattcatgcaagatcaaaacaaaccgctgagtgtttcattacatggcggtttgttttaatttatcaacagctagcttttcgaaatattacaagttggactagcacatactaaggaacagttggctgaagcttacataatggaggtctcatcatggtatttacaatcacaattatcatcgttgcactgtttgcaatatggggagccgtcgctcctgatcagctagcggatgtggctaatgttgcctacaacttctctattcagaattttggctggttttatttgctagcgacactgttcttcctgatctttgctttctatctggcgttcagccggtttgggggtattaggcttggggatgacgatgatgagccggagtattctacgatttcctggctgtccatgctgtttagcgcgggtatgggcattgggctggttttctggggagttgctgaaccgctatcccactatttatctgcacctgagggggcggtacccgaaacaacgcaagcagccatactttcaatgcgttattcctttttccactgggggctgcatccttgggctatctataccgtcatcggcttagcacttgcttacttccagttccggaaaggatacaaagggctgatcagttcaacctttattcctctgatcggtgagcgtcttgctgctggctggcttggtaaggttattgatattctggcggtcatatccaccatctttggtgttgcgacctcgcttggattgggtgctcttcagatcggcgggggtctgaatcacttattcggtattcctaactcgactctgtctcaggttgtcattatcatagttgtaaccgtactgtttttaatctcggcaacctccggtctggataaaggtattaagattctgagcaacgtcaacctcgttatagctttgttattgatgttgtttgtattggtgactggaccgacttcttttatatttgacacattcacaacaaccttgggcagttacatgcagaatattattaacatgagtttgagactgacgccgttctcaagagaaacctggattggagcatggacgttattttactgggcatggtggatctcgtgggctccttttgtcggtacttttatcgcaagggtatccagaggaagaaccataaaggaatttgtaatttacgtcatggttattccaagtcttttcggatttatctggttctccgtctttggcggaacaggacttcacatggaattgttcaatgccgctcatctggcggaggctgtcaaggaagatacgacaactgctttattccttatgctggagcagctgccattgggcacgatcgtggcattcatcgccacaatgctgatcatgatcttctttattacgtcggctgattcagctacctttgtactgggcatgctcacttcagatggcaaactggacccaagtacaagagtgaaattaacctggggaatcatgcagtcctccatcgcagtagtactgctaatcagcggggggttaactggcctccagacggcatccattgtaaccgcattgccgttcgctattgtccttatcggtatgtgtttctccctgctcaaggctctaaaggctgaggacaaagagcgccgtcagaaggaaaaacggcagcgccaaaagctgaaacgactgctggaggaacaagaaatctcgctgaatgaaatttccggcaggtaatatctgccttgccctggaacaaaatcatagtagatcgtttggccaattcactgcattgttttcacttttagctgtgtataccatttcaacaagttgcagaacttgccgaacattcaaccctctctaaatcaaaaaagcattgaatctcttccctcctacattacataggctctcgtgggggttgagactcaatgcttttagtgtttatacccggggatgaaaaaaattacaacgataacgatctcaaatctttaaatcgccttctcatctcactctaaaattgttttgagcatatttggatacgagaaagacagcgctggatagataggctaaagtcaacaccgtgatgacagccgttagtccccatagtgtaggacctagaaacatcgccacaacaaaactcaatgaaacaaggccgtttacgaatgagaaaagaggactgttggtttccaactccgttgtgtagggttgaaatacatagtataacaacagatgatgtactgagaaaaatacagccagtgcaatggttataacccagataggaggtagtaaacgtatatcctgtcctccagttaatacaagtatagatacacttattacagctgctaaacaagaacctaacgttagatttatccttaatatacttctaaatcttaacagaaaatgctgcttcgcatgctggcggtagaatggatagcgcatcagcggcttatcaacatggtagaatagagccttacaaatctggctgcctacggtcagatttagcatgaccataatgattaaaggtgagaatctttcaaatgaatttagtgaaagatgatctttgaaaatgagtaccaacaaaggtaggagtatgcctatgattataatagccaataaacgtctgtggaacggtgcacggaggagagcggtatgcctggtaacaaaaatttcgtgtaattgctcgtatccgtttttttctactgtgcgctgctcgttgacatgaaggttagacgaggttggcctgctaagatcatgttcttttgactgaaccattctctgttgaaaatcagccatccgtatttcgggatttaacaatggatcagcatggtttgttactgcgcgcactgcagatgtgaaatccgtatgttttagtaaaatatacccacagataaccccagataacgatatcagtatcaaaagccccggttgatcaaatatcacagatccaaatagaggaaggttcagttttgtgaaaggaaggtaagcaaaagtcagtgccagcaacatgctcaaactcgtagcccatgttttctgtacaagaataatgcctttccatttaaataatgccaaatgtaaaaattcacatatcactcgccaaaaagtcatcattcccacaaccagcaatgcatgagtaattgagaatttaaagagtacggcaaccagagtcattgcaatcccttgatagaagaaaaatgtcgtataccgataaaatagcgtagctcgcataaatttggttgggattatccgcataaggcgtatagatgtatacttcattttgtttgattccaacacttttgcactcgttaccccagccattacgccacttatgcaaaaatacatgtgaagatgaaggttaaaatgctccgtacgattaacatcttccgtccataagagcatgggcaatgcaaacattcccccgaaatataataagctttccaataacccagcgacaaataataaaataaccgcaattgcaccgatggtacgtttcgtccgaaaagcagcataagtttgttcactgattaatttccctacaaacggtaacttttgcgtgaaatagatcaaacggttgaccagcgtaatcatctgtaactgccatatgcgagaaattgtactaatcattcccgtcatcggcgttctccttcgtacttccgttttggctttcattccgtaataattcaattacctgctcttcaaagtcgggctgagtaaggatttcgggtgaaatccgtgttaaactcccatgatttaaaataattaactcatcacacagatccgttgccaattgcaatatatgggtcgagaaaattaggatatggtctttttttaaatcacgtaacaattgtttcatctcactcgcaacgatgacatcaaaggaagttaaaggttcgtccaacagaatcactgtaggttttatgagtaaaaataacaacatttgaactttattcttcattccatgcgagtaatgtttaatgagcttatgtcggtcatcctgcgcaatgtgcatcatatcaaacaggtcatcaatattgtttcctcgtccttcaattacatctacgttaacatcaataaaaaaacgtacaaattcatatcccgtcagaaattctggtaacagtggcaatgaatatacgtatcctacatcatccatttccaagtcacgcgattttgattcgttgacaagtttcattttgccgccatccacttggatctcgccacctaaacaattgaataacgttgttttgccggcgccatttcgcccaagaagaccatagatctttcccttttcaaattgaaaattcaaattagttaatacttttttttcaccaaaactcttctctacattttgtaagaccaattccatttatttgttcctcgctttcaaaccaattcaatatttgtttacctgaaaattcaataaaaccaaccatgccattgttcacatttttattcatatccgataattgtttagttttcatccgtatcaatcccttcgatttttttcataaaaggataagaattaatatccctttaagaggtgaatcgtctcacttgaccaatataactaatcttggaaatagacaatcacactaaactaatattctattttgaacgctataattccttgtatttacatataaaagaatatttgatacaacactataaacgttcccgctccaatatattaatgcgtcatctaaacagttcccgggttaatccccgcagacgttaatttagatttggcttgatgcaactgttccaaactcactttctccactccggttcaatagaacgtgatgatattttcttgataaaattgtattaaaaggataaaatgacgagcatcaacggttttatttgaagaatggtatagcttatgaaaggtggtttagcaatgaaaattctgatcgttggctattttagcgagacctcaaaatcaaatattgcaaggtgttttccgcaagactggaacgttgtaattgttccgcccggaaaagaaatgctggatcatattgaagattgccaggtactcatccctgaacatattaaagtggatcacagtctgctttttaacgctaaaaaattaaaattggtacagacgggtgcaggatttgataatgtggatgtccctgcctgtacacagcgcggcatttgggtggccaatgctggaggagtgaatgcacaggcagtggccgaacatgtaatggcactgatattgtcttattataaaaacataccgtttcttgatactttcatgaaaaacaagatggatgaaaatcaattggactatgcagggagtgagttaaagggcaaaacaattgggattatcggtttgggtgctattggaaaaaaagttgctgcgttttgtagggtttttgatatgaatgtgctggcgtatgcgagaaatgccactgcacaatcggacggttttgtgaaaatgacggattttgatactcttgtaagcacatcggacatagtcagtgtacatgtacccttgaatcagcaaaccaaacagctgatcaacaaagcggcattcaaaaaaatgaaaaataccactctttttatcaatacagcccgcggaggcattgtcaacgaaagagacttgattgatgcattaaaaaacggggatatttcaggcgcatgcctggatgtgtttgaatctgaaccgcttcctattgacagcgagctccggaatctgggtaatgcgatacttactccccatacagcaggaatgcctgatggtcggaaatttcataaaacaagatatgatttctttataaagaatataaaacgtgtagaaaatggtgaagagcctgaaagcaagcttaatcagttatgatgttttggtgcaggggtacctttccccgtgtaccgataaaataaaaagtcgcctaaaaaagcgaccttgatgggagtatgttcttgtccgtcgacaaaaaacatctccgaaaatatagtatcatatcttcagagatgttgtcctccaacagcttgtatattattatctttattcgctatctggtttattggcctgctcttcatatatgaatggatagacttgatttccgagcaatgttcttcgtccttggaactcatcatacagattgattcgaactgtcccactatttatgattttgcttaagttggtattcaagttcatgaagtatgatttattattgccaacggttaaatcggtaccaagtgttaataccttctctatggatttcccgctcgggtcaatgacttccataatgagcttatggtcagtagaacctgtctcataatctccattccttaagagatcataataaataacgatattaagcatatcttcccctgcgctaagcgttccttcacctctcgtaatgttgagctgatacggaaacaattccacatgttgcaggttcgttgctggttgtacaactctagggctaagtgctaaacgaacagtattaatagagcccgtgagttcatcccccacatctgccatctttccattcgcaaccccttctccgacatacagttcaagctgcgaagtattcacatttagtggaagcttgctccagaccgtcaccaggtttttccctttcggactggttttggcggacgattggctaacctctgcctcaaaatactcgttatctggtgttttgtagtaagcaactaactgtgactgcttggattgccgtttttcctggttggtcatttccagttccgtgtacattagattggacttagcgtcatggtaaatggtggtcaagcgttcacggacttctgatttcttgcccggagtatggatgggataagagtcgcctgcaggaaccaggctcataacgttgttgaacgcgttaaagttcaacgacagaaatttagtaatgtcctcgcctgctgtttcctggagctcaattcgtaattgattgaaattatacgaatacggtatgttggcaaggatatagagttccacggtttcattgggcgccaaggtcgtttggttatcctgtaccacgatttggcctgtattactgagatcccgcattccagcaattattgctgcttttaacacaggcagctgcacggtcgtcgttttggtattacgaatgctgattcgggctacgatctgatctttatctccccatggcagccgctgatatgagctaagcttcacgccaaatgtcccgtgactattctcgatgatattctctgagccctgatggcttttgccttcctgagcatatggaattttataaagggccgtcgggaagctaatcttcccttccgtagcaggctccgtcaattgcagttgcagcgtattctgtttcatatgcaatggcacatctacatccagatcgataagcttctcctccatcggcttcagcgtttgttggtcaaatgccttggcattcaccggaatgctataaccttcatccgtaaagatggaaagttcataagctggcagcttcacggatttttcactgagatttttaatgcggaattgaatattccatttgccagtattgttctcagtatatacagaagcatatttcagctgcgtttcaatcgtttgatggttcaccgaaatttttctgatgccataatccggcacaggcttatcagcggtgacggctggaagtttgaaggtttttactggtagcatcatgttcaacgtttcgtcttcttgcgtaaattgcatcgtcataagttctgttttaaggttggatggaacctctgccaaataatatatcgttcgtttctgccctggctggatcttgaagttgcttcctgtatcatcctcaggcacaagatcgaatactgagcccccggccgatttcagttgtgctttatatcctggatcgcttagtaccttcttgcccccgtttgcaaattgaacggccactctcatgtatacttttccattatgattcattcgctgcatccgttccgccttgaccgtgactggctgctgtttcatcatgatcttggtgctttttcccttcactacagcaacatccggggttgcatcgggaagtttgaacgattgcactgggatctggatcttcaatacttcatcttcctgcgcaagctgcagagtcatgccaggtgtcttcatcgtggagggtatctcagcccaataactgatgactctgctctcctgagactgaagtttgtagcctgagctggctgaatcgggtacaagctcaaatgttgaaccgcccgctgaccttagatatgctttatacccagggtcacttagcatcttggttcctccgtttgagagccctagtcccaattgaacatacacttttccattaattttatacctctgcaaggtatccaccttggctgtgacaggaagattatttattgtgatctttttgctcttacctatcggaattatagatgagtactgagcaggaatcgtgaattgtcccagctttttctgataatttgcgctgttaaaatcccatccgaacatggaaattttgatcccgttgacctttgtcgagtttccaatgtttgcatagtacgtcacagacaggctgctgttcgcaggcaccgttcgtttatcagcatcacgggtcactgcttttccttttatagtcgtaccactcggcgtagaaatcttggaaaaataatcgataagctccaccctattgccgctgctgttactgtaacgaagcgtatatatgagaatacttccacctggctgagtataaacatccgtcccggtcagctttacatggacgctctgcttcaacgaaactgatcccagttgatctaatgtcagaccagacgcggctacagcagatttggaaacgaggtgatcagccgtggatgccccgtatacgtcaagggccatgaaatgacccaacacggcggcactgagtagtattgtcacaactgtttttttcggcctatacatgaatctacctccctgtataaaaagacatttgcccgcttttcattctgtgaagcaggaagcagcgcacgaatgcaggctgcttcccgccatttacctattcgtttagataagttgtgacccggttttggatcagtttggctacttcctcggcagttttctgtccgctaaagaatgcaacggactcttctccggcaatacttaacactttaacatccagatctacatattgatcggcggattgaacaatttgtttaaacacggcgaactgttcagccgatacttttgccatctccccatttggaagcttgtattcgccatttttaactttttcttgaagatcatcaattttcttttcattcacggatttaagcatcgagaatccttctcgatcttgtaacatttgcacttcttccgacaataagaagctgatgaacttccaggcttcatcctttacgggcgatttggcatggattgcgaactgttttatagtagctactcgcgagccttttcgatctccgatttctcccgcctgcggtgattgcagcagcttgggttgatcaaaaagcatgtagggaccttcgataaaatcaattggcgacgtaattgacgtggaattgaacatttgattgcccggctttgcttcttccgatgtcacaatcttttcctcgtacatttgtttaacctgctcgaacagattcacaaattcgagagaatcgaatgttgcctttttggccaaaggatcgacaaatgcagcatagttctcaacaagcatctcctgaaagaggagttcgggcgggtaggacgctaacgcataaacctcatcggtaccgcttttcttttggattacttcctttgaaaccttctcaaactctttccagttccaggtcttatcatcaaacttaacattagcgttgctcagcatttccccatctcctacaaatgctcgtaacatgtaccccaaaggtacggtatacattccatcattcaccttcaaaccgtccaaaatattcatttgcaaatcgtctttatccaatgtctgatctttattgagcaagtcgttcatgtcgagaagaaaacctttgcttacatattctttgaatgggaggtcatcaacttcaatgatatccatgctttttcccgataacatggctgtattcatagaattccgatacttctcgtagtcccctgatccccattgttctcccgtcttatatgcattgatctgaagatcgatgtccgggtatttctcttcgaactttttctccactgtttgatagaatggggtcgactctgtcacagacagggtaaggactgtttttccatctttcgatgtcactttatccgctgtactacttcccccggaactgcatgcggttaaactcgtgataagaacccccatagaaaggatcaaaatccactttttcattgtataattcctcctgaactcttcttattgttacgtctcactattccaagcggatacggtcgccatcttgcagaggctcgctacttttcagaatgatcttatcctctgcatagatgatgtcggtttggatcatcgtttctttgtcattcttctcgctggactcaatcttgactttgcgaacaacaaatacattaccgagtgcccccggctgctcctcgactacaaaaacataagtgccttcccggtcctgatgaatagcttcattggaaacaagcagcccttgatcgagagaacttttctcgattttaacccgagcctgctcacctcccttcagttcggcatcgaggagcttaatacgaaggatcttttgcggaagggttaccatccccgctccttcatcagatgctccctctataagtggctccgcattaatgatttcttcaatgatgccgtccatgctgttggcttgctgctcttgatctgtatctacctctaccttgatccgctctccgatggatatccctaatctggacaaacgctttgcatccgcattaacctcgaacttgtacccttgcccgctgttcgagacaatgatgtccggctcgcctgcggaagccagaccttctaccgcgttcaacttcgttataataccgtcgaacggagcggtcagtacctgatctttggtcagttgttctctcatttcgttgatcttgcgctcctgcgcagcaatatcaagtttgcctttttcaatttcccgttgtgcgctgcgcagcttaagttcatcttcttcgagggacgattggatgaactggtcctgaagattctgctgctcgatcttctgcttatccagatttgttacttcaagttcaatttcttgttttgtcgattgactatcataggtgataagcttctgtcctttctttacacgatcgccttctttcacaaaaatctgctgagtcttccgctcggttgaaccggacagcttggcttcagcgatcggctgaaggattccgctcccttcgataactaacgggatgtctcccatttttggctgctccgtagtcactttcggtaatgtcagcgattgcagcgtattgctgaacaatgtgaagagcagtagcaatcccataaagcttatgaacacgactagaatgattcgctttcgtctttgctcaacagcccctgtatttaactccatatcctttcttctcctcccaaaaccagcactgaaaagttaacctttaactccagataattgaataccctcaataaaatacgactccgcatacagaaataccatcaccatcggggccatatagagcatggatgcagcaaaagcaatacccttgtcactctgattaatcgtggataaaaagacggacagcggctgcttgaacgggtcgtctaagaaaataagaggctgttccaccatgttccaataatcaacgaagagtaaaatcacaagtgcggctaatcctggcttgatcatcggaacaatcatcgtaacaaatatccttaaatgccctgctccgtccattttggcagcttcaatataggcgtagggaatgtccagcatgaattgtctgagcataaacacgccaaaagctgcgaagatgccaggaagaatgatggcactcgtactattcagcatcccaagcatatcgaccataatgtaattgggtaccagcgtgacttggaatggcatgagcatcgtcatgacatataccaaaaacatagagtcccggccgcgaaattttagcttggagaatgcataggcagccagggccgcaacaagagtctgacctacaataatcggtacgaccatgaacaccgaattccagaacatcatcataaatttcgggttgtcgataaataccttcccgtactgtgcaaaggagaccttatccggaatcagcttcaggtttgcaaatgcatcgtctctacctacggctgcttcattcatttgcccgatgaggccataattgatcccaatttcctgttctgtcatcatcgaatttgtgaatataatcacaattggtgatattaagatcaaggcaataacactcaggatgaatgttaatacaccatttttcaatatgtagactattcgcacagactttgcttcacctcctactccatgtactgccgatgccgacgctccatcgcaaacagagctagaacgatcagcagtatactgacaaacatcaaggatgccgctgcggttagtttctgaatgtcgagtgatatgaacatattattcatatagtgctgcatcatgtaaatactgtcatggggataaccgccagcaatgagatacgtttcccgaaacactttaaatgagttaataatggacataatcactacaaaaaacatcgtcgaagtcagataaaccagtgtaacactccgaaattgccgtaaacgaccagcaccttcaattcgagccgtttcgtagtaatccttcggtatttgctgaagtccggcaaggaataaaataacgttgtaacctatgttcttccatatatagaccataatcacgactatacgtgccgattcggatttcatccaatccacccgtccgtatccgaaactatccagccaggcgttaagggacccgttccaatcaaaaaggatctgccaaatcatgatgatcgaggcggtgggcacaacaagcggcatcacataagctgttcgaagccatttttggatatagacatttttatgtagaagcatcgcgagccccaatgacagcatgatcataagtggaacactgatcgtactgaaatataacgtgttggaagctgctttgaggaaagaagcacttccgagcagctcacgataattatcgagtcccacaaaatgaccgtctaccgaatggctcataaacgaataatacacgcccacggcaaacgggataaggtaaaagagtgcaaatccgatgccgcttggcacaaggaagaacatggccgccgaagcatccttacggagccattttttcatggttttctaaattcatcctttcactgttaactttagtctttcattctgtttcctgttttgcctcccttccactcattttagaaaagagtgtttaagaaaatagtggtaagatattaaaaaattctaaagtttcttactgattttgcggtttcgtgagcagcttaacgaattaaagggcaaaataatgattagatacgcctaataggcacttggtagaagctcttgccccgcggcatcactttactttttttctattcttatttcatctagggttgcattttttcaatgcataatgatacagaaaaaaacctcagccgggttaaccgagatgaggttcttttaactttctagcaggtctcacgtatgctttatttaataacttcaacctttttatcccctgctgacttcgctacttctaacgttgttgtaccctgaatagcgactatcacgccagtagccagcatagaaacgattaaagttgcactgagtgctgtggacattttcttcttgaccataatcatacctcctatatttattatgtaataagcggctcaagacgatgacgagccgaggttttccatttggagtctcatcccatcgtccccaccttacagcagttcaaaatgaagttgagtctcaggtaacttcgtatttcctttccactgatttgcaccgtatcccaattccagaaccgcagcaatgcgctcgttactcagtacaccaaacatttcagtacggctcgggtcgtacatccagtcatgcaaggtacagcgcacacccagactttgctcatgagccagcaagcggaaattctgaattaggcaacagacagctgcaaagtcctcttcccgcttatattgatccgcctcttccttcaccaagaccagaagatacgcaggagcctggttctgtaatccctgcatgatgtccccataccggttatcagcaaagataaatcgccacggctctcggaggccatcatttggcgcccatacggcatgattgagcaactcaaggattaggtcctgcgataccggttgatccaaaaacttaatcggaccgtccatgtctccttccaaatctgacaatttcattttcatatcctcctcttctatgtaggctgccctcgcaatacggtccacttctgctcggctggtgtccttttccgacttcttggcgctttgtcgtaataccctatatgaagaataccaacaaatctttcatcctcacgtaagccaattccattgaagaacccttcatgctgaatcatggactctgtatcccacaacattcctaaccctcgttcccagcccagcagttggaagctctgcatcaccccgcaggcagccgcataattacggtcattggtcagacgattcggtcctacagtcgacataacaatgacgtgcgcaggaatatcggtaaatctctttttaaaaacatccagaagtttccctggaatcagcttgccgagcttgctttgtgacatctgttccagcatgcagtccaccaaccgtttgcgtgcttctggagttccggcatatactacacgccatgagccagactcaagatatggttgaagccgtatagccttacgcagtagttcaacaaccaactcctggtccaccggcgtagagttacatttacgaatactcctgcgctccctgatcaattccgccagactcatatgcttcactctcctttgttctatctggattcaatatttatactgctgtcttgtagaaattgatggattacttttagctccgtttccgaatatttgtcaagagtacgatagaagcgctcagcctcatgtatatgcagacgttcatgcaattcaaagatttttttgccttgcggtgacaaccggaaatagctctcctttttgttgtcgttcattttcgtacgtttgacgaatccttcctccagcagtttgttgccaattttggtgatacttgctttggacaaattcattgcctcggcaatacccgtgttgttaatgggctcatgcttgcctatgcaatctatcatatgaaccgcggtcaaatgctgagggattttctcgatgctttcacgctgggcgatacttaggaaatgctcgatttctgtatccttgtggttctcatacacatgtaaaaaacggataaattggtcataaagcaactgttttgttcgatcttttgagatcattctttgatcgctccttatttacttgtaaacaaaaatattcttttaaaaatagagttattctaaataaattcttatatttagtttactggttaacaatatatcatgaatgataatgcttatcaactatattctctgacattatgaatgatgagtttagagtactaaaccaccagattaatgactttagccctcacacgtttaggctattggccatatcctaacttggaattgtaagtaacgattaaagggaaggatttttcaatgttcccccaacaacatttgaaaagaggtcatgatatgtcttatttaccttattgttataattgttaatagtataactttgatttacgactaatatattgctctactctcttcactttttctaagtagattcgtcccgtagttccctgaagccatgcaccattacctgtccaattaacatcaaccgctcgatttaaatcaaaaatccgctcccaactttcttctttcgtcatttctagtatccccttattaaactcaccttcttcatgttcattatcagagcaaaatccattgttcagtaccaggttccatctatcaagatctgatattagtacatctgtctccttgagatcaatggtcaatcttacgcatttagttcctccctcaaaatgtccggtagatctcatatccggctttttgatccatagccagattggatactcacctttataattaggtaatcttgttttcatttgttccatcatccatatgtattgttttggaaacattaagtgttcagagcttccctccaagtaacctgtttcttgagcttgtttccaaacctctaatgtctgcatactccaataaatcattttcttgggtacctccttgctttaaatttctcgccagtcttccccatattctctttctaactcatctttaaatttaaagtatagatcttcaatttcctgatatacttgctcctctcgtaactccaaatcattgtatctagcctcgatcaaataaaataacagagccttttccctaaattttaattccatcttacgtgtctccttataaaatatagttcaactaagataagttttggatctctctgaagtacagataactcatcttttttgcttaattccttaaacaagtcccgttgctcaccatatatattctgagttggcgttccaagctacattcccttctctttgtatcatgccgcttgtcctttctcttttctataactgattgagcctcaaagataaattccatataacacatcgtaacggtttctagctgacatgacaaactgtgaacaaattatgcaagctattacgaatggggcctgatacgaacatgatcattttaaaaagtgattatgaaatcgaatccatccgtaaggcatgccaagtggtggctgaatgccatcgtaaaattgcccaggtacctgcacgaggtgccaatgtataattggtaattgcgcaccatgatcttgtccctcgacatcaattcataatgataatgaagaaacctcagctcggttaaccgagctgaggttttcgcatcaggtgcttcgaatatgccctaattaggacgatatagtcgcacctaagcttcttcatagtaaggtcacgcttgtgctttaataacttcaacctttttatcacctgatgatgcctctaacgttgttttaccttggatagcgactatcacgccagtagccagcatagaaacgattaaagctgcgctgagggctttggacattttcttcttgaccataaccatacctccaatgtctaattacaatatttaactttgttgggtaatccatcgggtgattgtattataacgtactgacaatgattgtaaaaggatttgttccttcctccggttgccctctattgcgactgaatatgccagtgaattttccgtggttacataagaatctaaataacctaaaaacggtttacaattacgacattaaatgttacattaatttgaaaatgagtaatttaatagattcgactggggttaaggatctggggattacgaaactgaggcagtgtttgccgtttgacagtctggtaagtatgaatatgacggtggttctaaaacaccattcattcaacattaggaggatattctaatgaaaacaaaatcactaaaattaattacagttggtgtgacttgtgctttagggattggaataggagtttatggctggggagctgcatctgccgatactagtccctctaaagatcaaatggaaataaaaatcaatgataacggtcaaacatatggttcatttatttatcatgatgaaacagaattagatctagttaaggcttttggtgtagacggaactgaaggttacatcaagacttcagatatgaatcaagatttgccacaaactcccgaagaagcaattcagagtatgaatgaaccaaaagtcgataagtatataaacttgtacgatagcaacgagaatattattggaaaatttctactcactagttcagatgattaacactaaactatactactcccccaaaaaaaggctctccatgatgattgagggcactttaaaatgccaacatctataaacaggatacccacctcatttctgagaagggttattctgttttctttgctccttgaacggcttcctcgttatctaccgcaaaacccgattttttaatttgctcgagctctttaataaaaggaatcatcattcaagacaccgataaagatggtttcgccagttaatgtcttcaactcgtcagcaactcgaagaatacctagattaaaattaaagtttaaactatgatcttgaagcttactcattaaaacactacaatgtctttgatttcaattggcatggcgctaccatcccctcaattactttcaatgaatctcccacttaatcggttaatttgacgatcacactatgcatatcttctacaaagtaatggtgcgatctatcttctctgcaactccttcgggatgatctctattacgtcaaagcaacgttgcatataacttttgttcattacatacgccctctgtttaaccacctttcgtttaatcttaaaatgtctcatactacttgaaaagtaggcacctttttattagataggaaccagaatgtaactaatgggtgttaacaacaaaacaaccgtttcaagaacgattgttttgttgttacattgtcatgaaagattaaactattgttttgtaatgttgatttatcgcttcctgtcactttaaattaactttttctctatatcaaaaagcttagaaatgcgggggaatagacgaaaggcattgccataagcgatcgctttcgcgttttcttcgctgatctgctgtgcttcatggaataccgactcccgttgtatccgaaggacgctgtccgctggccaaggtatgtccgctccgaacagaatccgatcaggcgcaatcaacttttggatcgtgccgaggttcaacgtggaatcataataaaggtggtccagtttggctatttcagcttgaaattgttccggtgttgtttcaacctgaatcgaatcttgcccgatggcggcaagcgcaattctccatttgatatacggcaccatgccccctgtatggggaagaatgaacgtaatgaatggatattggtcgaaaatacgatgaacagccatcgtagtgacagcacgcgtcgtatcaaaggtgccctcaagcagtgcaggactaagcccagcgattttttgcggtataaggatgggatgcagaaacacaacagcactgcgccgatccaattcggttaacaattcggtgtaatctggatggcttaaatatttcccctgataacttgtcagcattgcaacaccatccatcccgagaacatcaagtgcatacaatgtttcttccatggctgctgcgggatccgggagtggaagcgttgcaaacgcaccataccgctcaggatgaagttgagcatacgatgcgagctcttcattcattttacgtgccaatgcgttggcagaagattggtcgatgaacgtcaggtctgacggggctgaaaggaatgaaaacgagatgtcacatacatccattttttgcatcccgatctcgggcgtccacttcggcataaaacttggaatctccattcccaactcccgctgctttcgttgcatttctttagagatgatatggtggtgaacatcaatgacaggattaaacatgcgtgatcagctccttctatttattttcaagccattggtttaactggttttgcttttccgtcaatattttctctacgcctgcattctttagtttgtcgagataagcacccagttctgacgggtcaaaagttcctgtctgaaagcctgcatcatactggttttggacgttggccaccgaggtaatttgtgttttgaccggattgatgtcgaagctgaaacccatcgcccttgattttacggcactctcattttcgcccctcaagtgctcccacatgtcaggatcgttcccttcccatatataggacaggaaattgttccccacggcatattggtttgaatcgtatcctgttgcagtaacgccatccggcttgccgattaggtcattatctcgtttaacataatgcttgccttcgatcccattcgtaaacagattaatgactgcttcgtccgagtaaaacagttccaatacttgaatcgccttatccggctgctcactgttccttgccaaagacatcatgttggaagctacgctatttcgcgtcatatacgaatcctcaagggggacgcatacaagttcagtcccagccgcaagtgattccgagtaacattcattgatattccggatatacgagaaggctttgcctgccttgatcagattggagcccgtttcctgtgacgttgcgacatctttgctgaaataacctttttgataccaatcacgcatcaggtcagccattgtggagaaccgcgaagtcgcaaaaaggttctgcacggtgaagtcctccccgccaaaatccagtacgccaggtgctgttcccaatggatcaaaattcagcatggcttgtccgggtgtttcctgtgagttatagctgacaatcggcgtgacacccggctccttgtccttgataagctgcaatacagcagagatatcattccaggtttttatggcgctaaggtcaatagcatgtttatcggcaagctctttgtccatcacaaaactgggggaaagtgcccaagctttaatgctgggaacgccatatgtttcgccattcatcttcccggcttctgcggcttcctccggaacagcctccagtatctttttaccaaattcattcagcgattcgtccatgggcagtaactgccccctgccgatttgggattcaaggccgaaccatacgctggtatacaccagatccagtttctcgctgcccgccagcatcaagttcatttgattggcatagttcgatccattaacaggcaagagcttcacggtggcgcctaccttttccgctgtaatatcactgatggcttcctgaatttccttaacatctgttacatccccaaaagctggatacgtcatgaccacttcatacatgtctgttgctgaagcttttccaagttctgccccctccttactgtctgggtttccgcatgccgtcaacaatagaggggccgcacaaattaaggacattacctttatgaaacccacaggcaatctttttctgaacatcttcattcactccccatgtttgcttttggataagacatcttggatacgaagcataactaaccttttacggcaccaatagtcaatcccttgacgaagaacttctggaaaaacggatacgctgcgatcagcggcaacacgccgattacggcaatagccattctcacactgccgagaggtacggatgagacaactgctgtctgaccagacaaactgctttgctgcaagtactggacatcagacaacattcgattaagcaggttttgaatgctgtagaggcttccgtcattgatgaagatcagaccgttaaaccaatcgttccaatacgagatcatgagcatcagaccaatggttgccaggcttggaagagcaagcgggagaacgattttgcaataaataacccattcgttggctccatccacataggctgactccacgacttcgccgggaattgatgtggaaaagaaactgcgcatcaacaaaatgtagaacccgttggtcagtaaattcgggatgattagcgaccagatggtatctttcaaatggaagaggtccgtataaaccaggtacatcggcaccagccccccattgaaaagcagggtgaaaaatacgaagaatgacaggaacgaacgaaatggaagcacatttctggatagcggataagcgaccagggttgtgatcaacaacccaacgatcgtgcccacgaccgtgatgaacgtcgtaattccatacgaccgcagaatcaacgaatactgattaaacagatacatataagcatcaaagctgaattgagccggtaacaaacgataaccatccctgataatggcttgttcctcggttagggaagcggatatcagaagtataaacggaaacactgcagcgattcccatcatgatgagcacgaggtgaacagccatttgatatatcctatttgaatacatgttgttctcccccttagctaaaacagcgccaaatcccggtttttgcgacgaacgatcgcattggtcgttaatactaacagaaaaccgacaatggactgataaagtccggcagcggatgacattccgaaatccccaaaagtcatcaatccacgataaacgtatgtgtcaatgacatcggtagtcgtttgcagtgcacccgaattcaacggaacctgatagaacaatccgaaatcggaattgaagatgcgtcccactgcaagaagcaccataatgaccatcgtgggtttaagcagaggaagggtaatgctccagacttgcctccacttggatgctccgtccagcgtagcggattcataatattcttggctgatgcctacaattgaggccagataaacaatgcatgtataaccaacgtttttccacagatatacgacacttaatataaagggccatttaccgtaatccgcataccacgacacagggtctatccccagtaaaggaagcacgtaatggttgacgaatccgttttcctcgttgagcaatgccagaaccaagtaagcgacaatgaccatcgagatcagatagggcagcaaaatgatgctttggtacagtcgggaggcaaatcgcttttttacctcgttcaacaataccgccacagctatggagagcactgttccaagcacgataaatgcgccgttgtagagtaacgtgtttcgggtaatcacccaagcatcctgcgtttggaacagataggcgaaattatcgaagcctacccagtcacttccccagattccttttgcaaaattgatatctttgaacgcaatcacaatgccgaacatgggcaagtaattgttgatgaacagatagacgatgcctggcaaaatcatgaccaataacagcccatgctttctgatgttttggatgcggtttgcatggaaacctcgacgcatgtctctctccccctgttcgtaacaatgatgtttggtttgtgtaactcctccaacatccctcctattctatgaatgtcagtttatgtgactcgaaattgttcttatatgaataatacgatgtaagtaagcctcagtcattggtgtgattcactaaaaaaaatgatttcatttggattattacaccaaaagaaaagcctgtctaaattttaatgttatgtattattacattcactgcattaagcaacgtattataagccctgtgatcagccttttcatgccaaaaagcaacgcacctgaaaaaggatgcgctgcttcatgtatattaaagattgttacgaatggatggctgccatctttctgctgttgggaaacatccgaccaccaacaagcacaccacccgaaaatacagcttcgcgtggaggtgccgccgccaatgcatgcatcgcatttatggcatttaccaacgagaaagtgcctcgttcacccacttttggagttaatggcgcattggatataagcttgtacgtttctagcaaccagaagtcctccacccaaccggatgcttcagcgagacgtgacccacgggagagcatatcgccatttccgaatgggctccacgaatccaaaatgttatcggaaccgatatgcacggacactcccgtttccatcaacagtttgatggggggcatgggcctgtcaatgggcacgctcgtcatgatggctacgccggtcgcacacaacctttccgcgagtgagcgcacctctgtttccccaacctggcccaaacagtaggcatggcttaccgcggtacggccggacataccggcttgttctgtcagttcggcgaagctcctgatcgtgtatattccgagatgactcgggtcatgcagatgcaagtcgatgccagcagagaattctgtcgcaagttcaaacatggcttccagactggcatccactcggcggtccagtccggccggatccacaccaccaacatagttggctccagcacgaagcgcttgccgcatgacggaaacggagtcggatcgaagcaggccttgctggggaaacgccacaatttccatatcaatgcgtccccggtacatctcacgcacttccaagacctcctcaagatgagagaggccaatttgcggatccacgtcaacgtgtgtgcggattgccgttgtgccttgggctaacattaaatccaacattcgtttcgcgcgttctcccgccccggtcggtagttcccccaacatacttttctcaaattccaactggccgggcagcgtgacaaacggctgcaaagatttccacggctcaccaataaaatgcttgtccagatgggtatgcatatctgtcattggcggtacatagtgcagcccatccgcgtcaatgacggttgtcggcctaccggcaatatttacagatgtgagatccgcatccgttccgacagtctcaatgctgacaataagtccagttgcttgatcaatcgttagatcaaacaggttttccgaccatttgacatttttcacgagtgttaagcctttctccataactccatccccttacttcataattagattgtttctatcccatccgacaaccacggtaattccaaaagttttgagtcagtacaagctacctgtaatcccgatttccaaaccgtgcgggcctccggtttattaagcagaacttccctttccgaccgctctcggaacaataccatatcagccggagcgccaaccttaacgccataattatcaatgcctaacgcctgtgccgcgttatgcgtcagcatgttggtcaagatgagcgcatcccgtttgccgcccatgtaagaagtaatcgccaatagccaggcaacctcaatcgggtctgttttgccaaacggcgtgaatgggttgcgcacgttattgactccgattgccacattcactccacaatcctggagcagtttcacaggagtcagacctctatgataaccttctgggccttcccttccattcaaaaagaggtccgtcatcggcagcgtaatgacgctgattccggcaagacacagaagctctccgatagccaaagcttcgtgttcagggagggaaccgagcgaggttacatgtccggcggctacatgcccctgcattcctgcagcaatggtcctttttgcaatttccacaacggcacggtcgttggaatcgaccgagaaatccgcgtgaaaatctagtggttttccgtacttccctgccagagcaaatgcaaaatccaagtgttcccctaggtctgcatcctgataagtgattcctccaatcacatcggctcccatacgaacggcctcttccatcagctcaacagtccccggactcttgaacaccccttcttgcggaaaggcaactacctgtaaatccatttgatgttttaaggattgtttgagacgaagagcagattcgacagctctgagtccaagaaccggatcgacctctgcatggcaacgcatatgggttacaccattcctgacggcttcccgaatgacaaccagtgagcgccggtacatatcctcccttgtgaacgaacttttcagtttggatgttatctgaatcgcgtcctggagagactccgcctcccgatccatggaatccagcaaatatgctttttccaaatgaatatgcggctcgacgaatccgggtagcaataagccccctttgccttgcactacaagagacgcttcggttttcctttccccgcatggcgtgacaaatgcaatcttgcctgaggatatcccgacatccattcgcctttcatccccggaaatcaccgtatctgtgataagtagatcaatcattacatcctccgttcatgtacgcttttattacacgcaagaaacactttaagcataattcactctttctgagaaatcattggatgaaaaggataaaaataattagcgatcttggatgatcaaaccaaagatatttactccacatgatcgtagtgttatattacttaacaataaaataacttgttccagaaagggatgggtcgatgtgctgctgacagatttgctgaaaaacggcatttacgatgatgctagagtgattacggggcataaggggctagtacgtgaggttcaaacggtcaacattatggactgtccggatatcattcactttctaaggccaaacgagctcttgctgaccaacggctttttcatgaagcagcaaccagagatgtttattcaactaatcagggacatgcagcgtcttcagtgctcggggttggccatcaaaaccaagcgctttgaactaccaatccctgatgaaatactttgggaagcggatcagaacgaatttcccatcatcgaaatttccgatgtccgtctatcccttggcgaaattttgcagcgatcgaccagtgtgattctgaataacaagagtgacgaactgcaatatgcactcagcatccacaaaaaattctccgagatgatcatgcgcggcaaaggaatttccagcattatcgattctctgtccaaactgttctcatccccagtcgttctgttaaactacaaatggcaaactatctctgcttccagccagaatacaagtgttgctgaactcactgcagccgctgtaaatacacttcaagacttgtccgatatttctagtcccacttcgttgtgcttcatcaacccatcagtccgagagcgttgctgcatgctggtatatccagtaaaaacttaccgcaacgaaggctatttgttatcctttcattcgccggatcaatggactggcctttttggtctgacgcttgaacaggcctccaacgtcattggaatggagctgaccaaatcacaggctgtcaaagagcgctcccgcaggcacaaaaacgaattcttttccgatctgattgagggatatatcacttctgagcaggaggcgctgaaccgcggcaagagatgtgggcttatcaaggggcatgcaagcgtcgtgctgaccatgcgtaatgacgaggtgcatcacatgcatcaaagatttcctaatcacgaaggttcggcgcatccgaaaggagataatatcacggagcaagaggagcaatacgagcacaccaaacgtctttttggtgggttagatcaatccttcgtcatgtttaccaaacatgatacctactgccttctgttatctattcctgagtcgggatgggatgaggcgaaaatcaccgagcagctgtcaggaatgcttaaagagctacatcatgagactggactgagtctgtctatcggcattggcaaacctgcaacaaatgtactcggcgttcgtcattcttatacagaagcagttaatgcattgcaattcggctactggctaaaacgaaagcaatttgtccaatcttaccaagccaaggacatcggatatttattccacatgcttccccacaacgaactgaaacaattttacgacgcgaccttaaacggactgctgcagattgcagacgaacatgaaaaaaaagagttactgcgcaccttaaacgctttttacgatacacaatgccagcttgtcgaaacatccaagcaacttttcgttcatcgaaatacggtggtgtatcgactggaaaagtgtgaaaaaatcctgggtgtgaaactcaaagatccaactgaaagcttacgaatccgcatagcgatagccatcgaacctctgcttcttcaataaaatttgtccttgccttgggacaagcttaaaacaaaaaaagccgctataatagcgacttgaattgaacatgttcctgtctcgcgacacttctttattggaatatctatgagatacgccatcatggaataaatttattatttcgttaatatccacttttgtcgatcaagtgatggattcagttcacttaagaagagttcggtcccatcttccgatacctctaatgctttttgatgatgagctgaagtaatatgaactgatccgtctttgttctcgtgaaggacccaacgctggttgttgtaccctaagtaatgatacaactgaagtttgttttgccctatatccagatcaagcgtctgaccggccgtagtacgaatcgaatacgaacctgcttcgtcacctgtcggaacaaatacccacttctggacggaagctgcacttgtatcttgcaaggtaaccggctccccgttgacaaggttcacggtataaatggatttctgtgttgcggcatttataagactggacttggtgatgtttgcaggttcgctgttgctcacattgacattctgataagatgcggagccgccaaatacatggagtccaaagtggccttctgcaaaagtaccatccatgatatctatgactttttgactgtccacgtgaacgacaatatgcggaccattcgcttctattttcaccttatacgtatgacctggctgaatgaacgttggtacttttgcaagaacctgacgttcttcaaatcctccattgattttatagaacagacgaattgccttcatgttagggtctagattcagataataaccactgcgaccatcttcgctagccctgaacaaaatagaacctgcccctcctgtttcaccaagcatcatgtctgcttcatacgtaaagttcccagccttctctttggcaatataattcgcatcactaaaatatttaccacgaatcccatgttcactaactaaccatgaagcagcagacagatctttagtccatccactcaggtttgtccggaactcgccacctgagactttaacaagcacactactggaagttttaccattcggagtagatacagtgactgtggactccccttctttttttgccttaataactgcgtgtgagttgtctaccgactctatggctattacatcgttattactggaattccacttcagcggttgaacgcctagacctggtccatactcgaccatcgcctgcagtgtatccgactcgcctacccccagttcccgaacgctcgtatccatctttatttgagcttttgaaggaatgtcctcattccagacagattgaagttgatgcactttcaaggaaacaacgttcacattcccacctttcacgtaaaaactcatcgctctactagcaggatccggaaatattacatctgaaaagacgactttgccgttgttaccaaaggcttcaacagaagattcatccacaagaatacgcatcttgatccggttattctccatttgcgcaggcgcttcatgtttcttactaaataggttagaaaaatccgtttcaccggatgcagttcggtccacaaacatatgactatcacttgccttataacccacgaccgtcttctgatttgcaccctcacgaatgttaaagccaaactcggtcgctgtgctggttttagggatttcaatttcagcttcaatttcgtaagcccctgaaataataccttttaacagattcccggaagaaggactcaccgacttgttagaagcagaatacaaaggtttacgcagtgattccaattctttgattggactttgggtcatccgaattccatctttggttgttaccaatgatacttctctcggaatggttagttcacctttccaattggacgttgggaaagcgaacggatagtcccaattcgtcatccacgccatcatcactgtgcgatgatcaggcatgttagcgaaagacatcgaagcgtaaaattctttaccaaaatctgttcttagtaccttacccgccggattatcgttcacgaatttaccatcagctgttaaatgaccgataaaatactcggcatctgatccgcctgttttgggattcgctcctgtactgatcatcataacccactttttctgtgacgttccgtctaccggaagctggaacaaatcagggcattcccatacgcctccgcggacgtaatccccatatccccaattatctgtcaatgtccagtcaagtaagttcgttgacgtgtagaaacgaatatgatctcctccggacacaaccataacccagcggttattctcatcatcacggatcactttcggatcgcggaaatcccaattcccagcttcatttccgctcttacccgggttctcgatcacaatcgggcgttccttcgaatactcccaagtacgaccttggtctttactgtaagccagacctatacgctggttcccattcgggctatctggattaaaggaagtataatatgcaataaggcccttgtctcctgaatctccgaataaaccagatgcatttgtcatatccgcaacagccgacccagaccagacatgtccgtgatcattccagggaagtgcaatcggaagccgtttccagttcagcatatctttacttaccgcatgcgcccatgttcctccatcctgatgaaagagatgatattctccttcgaagtagacaagtccattcggatcactcgctgaaccacgtattggcgtgtaatgatattgtggacgatatatctcattgtaatattggctcagttccgtcacataagtatcctggaagtaagccgtccccttttttacgacgattccggtacttccactcctgtaggttgaatctttcacgtcaatcgcggccgtagtgtatccgtccaggaagacctgaattcgatctccctttgccttgatttccacatgatgtttggctcccatctgactcggataagtacgttgcgaactggaaattactgttccttttgtattcgtcaaacttacacggacctgatctccttccttcgtaagagtagcttcatatccttcagctccatcggttgaagatcgaaatgcgagagctgcaatagaatcaggacgaagggtaatattcccttcatagaccatatcagtcgcctctttgttatagatttgctgtgctatgctcccctgttctaccgtccctcttttgccgttgatatcaggttgccattttcccttgttagaaatcaccgtccccaaattacctttcagatcgctcaccacgatgttcgaaaacaaggcggatccatcccatacatggagtccaagctttccgctttgatacgaaatgtcctgaacatcaattaatggtttatattgattgccccaatatacttttagcgaggaacccactgccttcactttgagatgatagatttgccccatttcaacagaaactttacgctcctcctttaatctcccatctccatttcttgcatctcttaaccgaatcagacctgcgtccggaacgatttgcagcatgtacgagctaaggccatcttcattagaacgaaacaacaatgtggcgtctgccttcgtatccctgatcatgacatcagcttcatagataaaatcgcctgacactgtctctgagatggccattacattttctttaggctgcgaagtcagcaagattccttctgaagtatcctctaatccaccttttcctttcacttgccagcctatcagattggtgtttgatttggatgcgctttcaaaaatatcaagctcctcctttgcctgtttatttgtttcctgatcagcaagtacagcactagccgcaactgatttagatgtaaaaatcccgtttgaagtcagagttaatcccgttgccatcagaagacatattgcgaatttagatttatctttcattccataccctcttttctaataatattgtaaagttggttcaaatttaattggttttggacaaccagttcagttcggttgattttcccaaatgcttacgagatcattgatttgaagcgacacgacctttagttctccgccaatcgcatagagttccagccctctacttcccaagtcggggaaaatcgtgtctgaaatgatagttgtcccattgttgccaaagatctctacacttgaccaatcaacatagatgctcaactgtatccgtttatgctctggcttcattggggccttgtgttttgcaacaaaatcgggatggaaatcaacagtgttcgacttcgtccgatcgacaaacaactcttcattcaagacattatatccgatgactgtctcctggttggaagaggaagactttcgcaccttgaacccaaattttattgcattaccgatttcgaattccgcaataatttccatctttgcagcagaaacagcagacaaaacgttcatatctggtttaattgtaatgtcttgtagagacagaattgatctcttaagttgatttaactcagttatgggtgcttgaattaagcgaagtccttccgaatacgtcctgagctgaatctcacgtgggatggacatatgaccacgccattctttagaaggaagagtggaagcataacgccaattattcatccagccgacccaaatctttcgcccatcctcattcgggataccgtcccaggtcacggccgcgtaaaagtcagatccgtaatctatccattggattgtatcgaatgattccaatgtttcatctagtgtaaaagccttaccatcaaagtgaccaataaaatacatcatgccagaaccgcctgcgggtggttctgaaccgtttggatttacgccatttctatctccgacacttagtgtcagaatccatttagtggtattagggtcctcatccacttggagtttaaaaacatcaggacattcaaaaatcccacgatgtatgcctggaatatcagaaccgaaatcgcttgcaaaaaaccaatccttaagattcgaagatgtgtaaaattctacacggtcacttacagcaagaaccattacccagtttgaagattcttcatgccagaatacctttgggtctcgaaagtctagcgtctccgtggggaataaaacagggttaccttcatattttgtccaggttcgacctttgtccttactgtaagcgatgctttgaacctgcggtttaccgggttgagcgctgttaccattattagtataaattgcaaccaatcctgatcctgcttcgttgaagaatccgcttgtattgttcttatcgactaccgcacttcccgaaaatatcgctccatcttccccaggcgagatggctggtgggagttcatcccaatgtactaaatcattacttactgcatgcccccaatgcattttgccgaagtcaggctgcgtatcatgcggagtatattggtagaaaaggtgatattctccttcgtaataaaccattccgttaggatcgttcatccaattttccttaggggaataatgtatttgcggtcggtattcatttttataaataaagttttctggatcttcgctgatactattttcacatgatagatgtacttttttaattttattcacgctcccttaaggctatttaaaatctaaaaaaagtaatatgcattccttattaacaaaataatccactcatgttcatttgtcaaagtatttttggataaatgaacactattttttatgtataaatctgtttcagtttacatttgcgcaatttatgattaattatagaaaataacagttttttatttaagttgatctaatcatttttttatcactttaaacctaagagtttacaaatgtaaaaaaagttgcatctaaacttctctttacttgttcaacaaaatatcgttagtattaaacccaattttaccgataaaacaaaaaaagccgctgaaatagcgactttaataggaatatgtccgtgtcccgcggcaggttaattaattaacgtcttgccttcatttaataacttcaacctttttatcccctgctgacttcgctacctctaacgttgttttaccttcaatagcgacgatcacgccagtagccagcatagaaacgattaaagctgcgctgatggctgtcgaaattttcttcttgaccataaccatacctccgatatctattatgttgtaataagcggctcaagaatatgacgagccgagtgtggctagatattacaatatttcacttttttgtttggtgatctacctggtgattgtattataacgtgctgacaatcattgtaaaaggattttttccttgtgtacaattcccggacttattactacctggaacgtaaggtcaatgattcatataatgggcatatagttgctcgaaggttgtgaaacgttcgactgttctgccgaccttatcatactcgtctagatattcatccatcacttcaaggagcttctctttcataactggtaaattacttgcatcaaagtactgcataagatcatatttcttggttcctttctctacagccatttcatcaagatacccatgtgctccaaaggccgaaagaaatacgtaggaagcatcgttcactgtaacactgttcaaaattttattgcggtagttgcaccacaattcttcatatgttcccctcagattatcaaaggtcggagccggtttaacaatgaagttatcacacattgtgttatgtaacctcgtaacgctattcaacatattaaaagatgttattcgaatatcttcaatggtatgagcttcgatgattgacatgtataaggattcgagatcatctggaacatagcgaaacggacgtatctcttccaaatatcgcttgatccctcgtttgatacacgtgttattcatactcaccaaggcattgactagattgtacagaacttcagcagatgcatatcgcactgaaccgatatcttcacccagcatcgtatcgctgtatgcttgcttagccagatcgatccatttatttgctcgattaagacactcttctcctatcggattcgcaagtgcatcaagagctttttgctggaaatcgttcaatttttccaaatcctcaggctttgcatagtagagtattttcaggtcggttaggctcgatacgttgggactctccaaggtggattgctcttgtattcttgaatcccatggcgtgcaatagatatcatatccaacgtcgtccaagatgaagcagtcagatatttcccaacccttttctgtattattaatgataattaaatcaagatcgctcttctcgtgaaagtcctcggtgctaaatgaaccagtaagcccaataatggcgatatcctctagaaaatctctttttacgcgttcaatcaccatgttaatgagcagttcatttttgtccagcagcttcttctttatgatttcgttcattcgttacacctctttgtatgatccggccatccttcatcacaacaaccttaacttgagtctatcgatttagaggtgcggttactatgtataagttgatttaagtcatctttgcacaaaatccgctaaaccgtcgatacgacgacttagcggatttcattagttccttgattagttttttgtatagactattttctttatgctttcgcaggacaagaaataccgatccgccaactcctctatcctgactccattgcggaataaggatttaatctcagcgtttcgagcagagaccctgctcttgctctctgttttctcgccccatttcagatgcgcctctttgggtttggggatataaaccaattcgccttgaacgtattcttgaatgatacgtaacaattcttccggaaaaatagactcggcttttgaatatttcatgggcctcactccttatttaatagatcaataaggtgcaaagccagttagtagaatattacgattcgtcgttggcaatgtgattattcccgggctctatgcaaagcattgccatatccttcactggctttgcatagagccgtgcatgtaagaatcctactccgattgttttcaatagcctcacctccagaaaatagatagttgctatttgcttattatatcagggcttgttgttcaaatgtttaatcatgtatttttgggccaacatgttctgattattctgtactcaccttgattagctgctctctactttaccagtgaactcaagactccagcctccatgacatctcccaaaaatcaagctcaaagcgactgcacatcacgaaaatatcctccatccgttggtacgttttctcgctacaatcttctaatagcttatccgttaacgtcacaagggattgattgttgctgttgtattcagaggaagcatatcctgtgatccactctccataaaagggatgatcagctgcacctggcttttgggcaaggacttgaccaatctctgcatagctccatgagcaggccagaatggatacaagtacttctgctatgccacccgcatgggaaacagagagcatatagttagtataggctgcatttttcagtgcaggttttacctggaaaacatgatcctctgtaattcctaatcgctccatataagaacgatgaattttcatttcaccattcaggatgttatctacgttttcactaaaaaactgcatcaatttggggtcgtgcgacttgacgatacctattgcaaatacacgggcataatcgaacaggtacaagtagtcttgcagcagataataacgaaattgttcgaccggtaaggaaccatctccgattcctttaacaaagggatgctcaagacattccttccacacaggctgtactgcctgatatagtctctctgaaatagtcaacatatgttcctccaattcataatgtacgtatttaaaaacaaaaaaacgaaacatcctatggatgtttcgcagacaaatacactaaaacaagggggttcgcatgagctacccgagtacagtgtttcatcgttgcatccctacgttggcattatccaaatcaggtaaggtcggtttaacaccctctcagccggttaaggctccctcgcaaacggttgtatgtagttgatcactttcttaatcccataaaagaaaaaataacatccatttagtatatcaagggctgttaaatatagtcaaggcagattgtatcgccctcatcagcttgagtgacgtatgtaaacgatgaaaaccatcacaacaatggttgagttttagccactgttatgatggtttctattcttgcaactactgccgatggtttaatgcccgagtttgttctttcccacaaaagtgagtattccgtactgggaagtgtttctccagctctcattggtcgtatcattccacttggctacgctctgcttacctccgccctggttgtcgttaatttgaagctcgaaaccgagaacattccctgcttttggcgtcaatgattgcaactggattctggcttctacgagatatcctttattcgttttcttcacagcacttacaaggcgtccgggcgaggccccccctgcaaaggttcccacattgtctgcactgattctgaactgggcatcatcatattgaaaatacggtgtgcgctggtaattctcgtccaggaaaatctcaaccgaatcctgatcccatgggttgatgctgtctgtaatgatgtttggatcagtgacgtcgatcagcagatatagatactcacctgaccacattgcgcgagccactgcctctgcaccttcggtctcattcaatcgttttacttcaaatggtacagccttattccatagggcgtctttcttcccatcaatctgaacaatcccttgcacagcttgtgcagatttgggcataggggcaagctgaatcacgccgtatttgcttgtatcttgttcctgagattgtgttcgatcattccagtacagtggattataaggttgtgtcccacttgaaccgccatcagtcacacggatatccaatccggcttcatattctgatccgacttggataccaccccatggaatggacaattcaacctgatatccggctttgttctcgcgtacacgatatgaacgctgctccgcgccctcagctttgcccgaccgcttaatgattacatgtcggtcatctgcttcatatgaggtggtcttgccattattgagatcaacaaagagttctactctgtcattcacatctgcctttgcatcctgaacatccacaaggatatacaggttactatgatcccataaggtgcggaaactggctgatcccgaagagtcacccttcagtggagtagacaccgctttgttccagagcggatcttgtgactgttttttgatatccggtttacccgaaagtgagacggctctctgtgtcaatacaggcaagctggattcatccacaagtccccagtatgcttttttggccttcagggctgaatcaaacagcatagcctggttgttgtaagacttctcatcttggagtccccataaggtaactgaagaaatgtggtctttgtgttttttgtacaaatccaacagttccttatatcgatacgcctgctttactgcaacttcatcggacatctcttcaccaaatggaattccgctatccacatccagttccgtgatctgaatatccaatccaagttcggcgaacatgttgatcgttttttcaatttccttgatgggcggggattccaggttatagtgggattgcaaacccacaccatcgatgagccctttctctttcagtcgtttgaccaactgatacatatgctctcttttctcagggatttccgtgaagtattcattgtaatataatttggcatccggatcggctgcacgagcgaattcataggttttctcaatgtaatcctgaccgattagttcataaaagggacttttacgtaaaccgttggcatcaccattgctatccgcaatcgcctcgtttaccacatcccaggcatagatcttacctttgtatcgggtcatgacggtttcaacgtaatcctgaatccgggcaagtagtaattctcgactcgcagggttaccctgaggatccttgaacatccactctgctgcatcaatatgccacaacaatgcatgtgcgcgtacgcccataccatgctcctcggcgaactgaacatattgatcggctgcctcgaactcataaacaccttcggaaggagacatgtacttcggtttcatctcgtaggttgcggtcaagctgttaaagtgctttgtgagcagttgtccatatgcgccttccaactgccagcgatacaccgctgcaccaatggggaaatcatcttgatacaggtctttcagagacagaatcccttcttcaatctccagttgctcggccagagtaaatgatacatcatccacatagaacgataacgtatctacgctatcttcagagatgtagggtgtttcgatgaacaaattcaattcagtgggatcatcgctatactgaaattttccggtgatcttgtgccatgtattccattctgctttggcaattttcacgctaccgatcgggttccagctttcggcagttgtttttttatatgtggtgagctgtaatgtttgatccgtggtgggctcctgagtaagtcttacatatgccgcaatttcgtactcttggttacgcttaagcagatccttcatggataacatcggtccatgataggaacgctcacggttggtgaccagcatactggactgaccttcgtgtgcttcctgctgtgtcactgtcagcctttcgttacctgtacgtggagtccatccctgaagtgtaccgtcttcaaagtttgtgctcaaatgacctccctccacttccgtaactgccttggctgcatgtgagacattcgaaaatggaagcatggcgagtatcagcacaagaaccaaggctgcaatattccattgacgtaaccgtttcatacaattcctcctcatgattgggtctaattatttctgaacggattaacatccagataaatagattatagctctttggataacgcttacatataacaaatttacaataattacaataaaatgttatcacttggtaatctcatgtgggtttaggaagctggagttcgttcgcatgggatatcaaaaaaacgctacatatttgcaaaaataaaagaccgtttcccgataaaatacgagaaaacggtcatcgttagaaagcatcttttttctgttcattaacaggcatataaactttttttataatcgtccctcgtgaccctgatcctcctgcacaattcgagctatgtgaatcatcaaatataataattcctcgttcgatatggagatatccagcatattctgcacgtaggttttaatcatctccgcgcatttgtattcaaacggatgctccttcaccatgtgttgaaatataaaatctttcgccgaattgcccagacgtccttcttgtaaacgctggatgaagaattgcaaatgtgtgacaagtcttacataatgaatggaatttttgttcaattgcatatcaaaggtgtattgtatcaggttaaaaatatcttttaacatcttaacggattgcaccgtgcgctccatattctgctcatgtgtttgggcattcacgaaatgaaaggcgatattccctgcttcttcctccggcagttcaatatccaattctagattcagcatctgaacagcttcaacccccagttcgaactcgacaggatgaaacctctggatctcccataacatgcgattctgtaatgctacaccttttttccatcgttcaatggcaaatgacaagtgatccataagcgtgaagaagatttgatcgtcaagagacagcttttcttttgcattggtaatcagtttgtttatgacattcacatgtttatctggcatgttttcgatggttcgtacgtaagcctgggcagacggattattttgcaaaatgaatcgtttctggatgtgttcttcatccagtcgctcgccgactttgcctttgaatgccaacccttttcccatgacaatcatttcttgcccctgttcatctttgatcagaagcaagctgttatttaatattttgattactctcatgcattcatcacgatcctttattctttcgtgaccgcctgatccgaatttccgatacatctgccattctgtttaatgacctcttgataccacgagaagcttttcttcttcaaacgcttcaagtctttcagatcctgttcaccgcggtttacatagatcattccataacgtttcccatacccctgatgtgtgcttaccaagtcaataacggaccaagggcaataaccaatcacatctactccatccgttagagccagtctgatctgttccagatgtttctcgataaaatcaatccggtacgtatcgttaatggtgttatctgcctcaagtacatccggggctccaataccattttccgtaattagaatagggagaccatatcgttcacataccttacgcaatgtcagccttaggccaaccgggtcaatgacccaaccatatttcgttttttccgtataaggattctccgcggcccggtatactccctgctcgccaagcataatttgctgatcacccgcacgagctgtaacatccgacgcatcgcccatactggcggcaatggttgccgtcgagtagtagttgattgctaccagatcggggcggccaaactggatatcttccatgtcaccctgctcaataaccggctcgatgccgcgttcctgtaaataactccagaataatggattataccgtccccacaccgataagtcgagaaaaccccatccacgaatcgtctcccagttatgagcagcgactgcatcggctggtctggaggttgcctggtacatggaagtcatgtttaaagcaggtccgatcttaccttgcgggagcatatcatgaaatagtcgcatcgttctgccttgagctacaaacatgtgatgattttgctgatacagttccttattggatggcaaacgcccgccttttggtgtaccaatagcacctggatgaagaatcatcgtattttgctcattaatggtcaaccaatatttcactttatgcccgtaatgctcaaacaagatacgcccatactcgacgaaggcatcgatcgtcccccggttgttccatcctccggttttctcaagctcgtagggtaagtcgaaatggtacatggtcacaatgggctcaataccatggagcagcaattcgtcaattaattggtgataaaaatcgagtcccttctcattaacagtccctgtgcctgaaggcaagattcgagtccatgcaattgaaaaacgatatgctttgaggcccagctctgcaaaaagcttcacgtcttctctgaaccggtgatagtgatcgctcgcaaccgtgaaatcggcggttccagccggatgatcacacatatcgatgacggacaggcctttgccatctttgttccaggctccctccacttgataggccgaggtagaccctccccacagaaattcattggggaatggtttgatctgttgatataacatctcaagcactccttcattttaaatgttgatcatgatatatgacggaccatatgaagtatcgtattacgtttgttacgaaagatggataatggttgctccaacctccacaggattctgcttctccagcttaatatccgagaaacgatccgaattggcgataatgatcggggttatgacttcatacccttctgccttgatggcatcgatatcaaagcggatcaacaagtcaccccgttgtacgcgatcccctactttaatggaagagtcaaaatgtctcccctttaggttgacggtatccactccaatatgaatgagcacctcttctccatcataaccgtttaatttgaccgcatgtttggagtccatgaaagccgtaacttcacctgcgattggtgcatacagttctcctttggcaggaataatggcagcacccttacccagtaatcccaaagagaagacatcgtctggtacacggtctagatggactaattccccttgcatcgggctggcgatcgtaagtggacgtaattcattttggctcggtacatttgcatttgttattgtagaagactgtgtgcttgggctgttgtcttgaacaggctgcccggaaagtgtcttgtcatcgttaacgttggtagttccttcttcttcatcttccactggatcttcaaaaccaatgatccatgtcagagcaaaggtaacgataaaagcgatcatacaagtcacaatggcatgaacgatgttcatcggattgctgccaatgaatgcaggtaacgcggcaagccctggagacacgaaggcataacgtactaatccggtcagaccagcgtatatccctgctacaccaccaccgatcattgcggcaattaagggtttcttcagtttcagcgttacaccgtacaaggatggttccgtgatgcccagcacagcggtgaaaccggatgaagcagcgagctgtttcagttttttgtttttggttttcaatgctacagcaagggtggccccaccttgagcaatattggacgcgagcattccgggaccgttgatcatttcatatccatttttggtcagttggctagttgcaatcggcgtcatggcccatgcggtacctgttacgatcaggaatggttgcaaagttcccattaacaacggaatcagccaactggctctggcattgatcgcttctgcacccatcgcaaccagatcattcaggtacgttccgaaaggcccaatcgccaccaatgcaagtggtgctgtaatcaatagtacaatcattggtttcgtgaaaaatttgatcattgagggcgatacccgatccgcgaaacgttcaatataggacatgagccaaacgacgataataatcggcagtacggagcccgcgtaatcggttagtcgaactggcacaccgatgaaaaacacgtcttttccttccgccatcagggcgctccatcccgggtgtaataacacgccggcaactgtcatcgccagaatgggacttgtttcaaatttaatggaagctccataagccagcagaataggcatgaaataaaaagccgcgtccgcaatggtattaaggatatagtagttttggctttccgtcgttacgaggcctgtcagcacaagtacggctaatatcgctttgatcatacctgcgccaatgattgccggaattaccggagtaaatgttgttgagatcacgctgatgaatctggagatccagctctgtttttgctttggtccgttatttttgccagaattcgatttggagtccgcacttcgggtagccgaacccatctgctgagtgataactcggtagacctgctgcacctcattgcccacaacgacctggtattgtccaccattgttcacaacggtaatgacacctggaagtgctttgagtttttctgtctccgctttggagatgtcgtgcagttcgaaccgaagtcgagttgcgcagtgcgtaagccgagcgatattctctttcttcccaaccaattccgttatctcttgtcccaacttgcgataatccataccaatgcctcatttctgaatttggatataaaaaagaccaaaacgatatgccctcccctactcacataaggaaaatgcaaaatcattttggtcatgcctgctttaccagtaacagccaaacactgctaatattcaattcgttatcgatgtaaacgtttactggatcataatatcacacaataaattagttagcaatcactttattcgacatttttctgcattttaatttgcttgattcgacttgattattagcagccttctataggcttccacccattccccttctcatttgcctacatacaatacattagactaatgaacaggagtgatgtgatatgacatttttacctccttttggacctggtggagggttcggtggccctgggggtcccggaggaccaggaggacccggcggaccaggcggatttcctggtccgccatcgttccccgggggtggaggcggcggaccacaaggcgtgcaggcacctacagggccgccaccatcattcattccacagcaacccgcttcgttatatgcggtagatccaagagccatatccggctgcctgtttcgttacacatatatttggccggatcgtggtcccggcttctggatgtacccggtatttgtaggtagaaattcggtggctggcttccgttggaatggcttcttctggctatacaccggcattgatctgcagcgaatcagctcgtttagctgtttctagaagtaaatccccctatatgcggattaatccacatacagggggatttagatttatggaatattcaccttgtctaaagcagcttaatcagcttttctagctcatcaaccaaactctttgcaagttcaaaattagtatcttttaaagccaattcaattttcatttcaacagactttttcttttgttcattttctagatagttttcattaaaatgactcgtataaatcatctgtctgaattcttctatactcattttactaatcgttttgtcctcgataattaaaacataatccataccatttacaaccgaatagaaatcatgagaaatcatgataatcgcacctttgtagtcctcaatggctttctccaatgcgatttgtgtatagatgtccagatggcttgtcggttcatctaggagcaatacgttggcttgactggcagaaactttagccagttgaagcatatttttttctccaccagataaagattcaatcttttgatcaaggatttctccttcaaagccatagtttggaagatacgatctaatttcatcatacgtttgaaagccggaatcaatgaattcatttaggatggtattcgaatcttttagcatttcgccttgaacctgagataaataggccactttaacatcagcatttatttcaatggcatcctgattatttttaaagatttctcggagtaaagtcgttttcccggtaccgttaggaccgatcagggctactttatctgtagatttgatctcaaagttcacattttccaaaagcaactcgtcaaaggaaacgttatagttattgacgttaaccacaacggtgtcttccatttccttatcgattccaaaacggatattcggctgtttgatatcgacaaatggctcttttattcgacgtgcttccaatctctcttgaaacttgactctggcttttaacgctctgcctctggaggcttcggaattatatgtggcgatctctctaagattgtcgatgatgtgatcgtatctctcaatttcctcagcttcagcaactgcgatttcttgcagttcgatcttagactgaagcagtgagaagttgtaatcgatatatcgcccgtcaaactcttggagctctgtgttttctaggtgtatgattttgttgaaacaatggttcaacagatatcggttgtgcgtaacgaccagcaacattcccttgtgtgtgttaatcaattttttaagcgcgttcaggttttcaaagtctaaaaatacatcaggttcgtccataatcatgaagtctggacgattcagcatttccttcatcacttgaataagtttgaattccccgccgcttacggcggatatactaagatctttgagcttcatgaggttggcaaggtttaactgtttattgatgtttttttcgtaattatccccatccatcgcctcgaatgcatccaaagccaattgaagcttttccatcagggaatccatatccgatgtggtggccatctccgcataaatcgctgtaatttcatcttgtatcttgatgaattcttctgcgatatattcaaaaacggtcatttcttttgttttgtctacttgcaaaaactgactcacatacccgattctgcaatcggggtctatctctaacttgccctcgaacaaatatagttccggatccatcaggatatcgatcaatgtactttttccactgccgcttgttccgataaaagcacaatgttgtgcctcttcaaacgtaaatgaaatgtttttatatagttccttttgtggaaatgagaaggataggttttcaacttttatcatagtgttacctttctttacaactaaattggtggctaatattagatatattgtcgaacacagacttttagagtaacactgtttaccaccaagtacaatcgatttttagcacttaccctcactttgaaactctatactttctatagaatgatggctagtggacggtggttacttcataaaacactactgacatactgttgtcagtagtgtatttgtatagttggagtaagcaattttaaaggagtaaaagtaaatgaagtgtttttgatccaaaatgtattacttattataggaaggatgatatctcgtgaattttgcttctgtgcgtatcattactgatgacatggatcgtctcgtcgagttctatgagaaaatcacgggtgtttctgcagaacgccctgcacctgtctttgccgaactcgttatgccatcgtgcactctagcgatcggccactccaagacggtgcaactatttggcgctggttccgctgtggcggccaacaatcgtactgtcattattgagttccacgtccacgatgtcgatgccgaatacgagcgcttgaagccgtttgtcgatgagtgggtaaaggaacctaccacaatgccgtgggggaatcgtgctgtgctgtttcgcgatcctgacggtaatctggttaatctcttcacgccggtgaccgaggaagcaatccaacggttcagtggtaggctataaaggacagttgaaatgagctcaccagagggaggcatgctttctaacgatctcaataaatgcttctacttggggagagatccacttgtttttgggatacagcaactgtgtagctagattttgtttgtactgctgacctgaaagtttttcctccttcagctccttctctaccgtaattcgaggtaacaaggatatacccataccgctcaatatcgactgtttcacagcttcaatactccagaattcaatattggaagtaatccctatctgatactcctcaatgcattgttcaaacaatgtgcgataaccacaacctctttcggtaaaaagtaaattgcttcgtacgatgtcgcgttgtagctcaaatgaattggggtacaacagcatcatgggctcctcagccaatttctcactgtacagattgggatcatgcacctctgtccctagcatgaaggaaatatcacttttaccttgcatcaaattctctttatattgtacggaatctaattggtgccattcgatattgacatggggatgcaattttttgaactcttcaataataggaggaaaacgatagatcaacaacgtttccccaatactgatcacgatattacccgttaattcaccttgtgcagcagtcacttccttaatcatgtgatacaggtcaagcattttctgtgcatgtggcaacaatttttttccggtctccgttaaaataacccgcttaccaattcgatcaaataaagggtagttaatctcctcttccaacgccttaatatgcaatgtaattgtagattgcgcgtatccaagatgttcagcagctttggtaaatccctcgtgttccacaattgtaataaatgtgaccaaatgacgtatttccatcattggctcccttctttgtaacatcattaaaactgatcgtttacatataaactatcaatttaactaatgtaaagcaatcgtttatattcaatgtagctcattaagagcccatttcatttttaatctcaatcgtttatggaagggagtaatcactatgcaaacagtagcaacgtcatccatcttgattaatggatatcgaatcgcttatgagcaatacggagaaggctctcccatatggctccttcacggaacaccctcttatagctatgaatggagaaaagtaatacccgcgctggttcaaaaagggtataaagtctacgtacatgaccttcttggatatggagcatccgaaagaccactcgaagcagatacttctgtggcagcacaatatacgctgtttagtcagcttttagacgaactcggaatggatcgtttacatgtcgcagcccacgatctaggtggaattgtcggagtccaactggccttggaacagcctgaacgtgtacaatcgcttacgttactcaacatgcccagctatgattcgtggccctcaccaacctggaagaaaattatcgaagaacagcttgaacaggttgaacaaatgtcccgtgctgattttgataccatgctaaagaaacaattatccatggcagtgtataataaagagcttatgactggcaatgcactggatgcatatctggaaccccatacaggttcattgggcaaagcctcttttttctcccatcaggtagctcattataatgcaaaatatactgaatcctatggaacagatttacccaagctgaaagttcccgttcaaattttatggggggaagaagacgaatggcagccccttatgtacgcaaagaggcttgtccaggatattccccatgcctgcctacatgtcattcccaaagctggtcatttcgtaatggaagatgagccggggcaatgttcagattatatcgaccgtttctgcaatgagcatccgtgagttaggatgcaatagaaaaaaacacgaggcgcgaatgcagtctctcgtgtttttctatttactttaaccttggtttgtatcttcggaatacgttgctgattaatgtaattagatgcttattgtataacattcaaggctcggtacatcattgccacaaactgtgcacgcgtcacgggttcatccggcttaaatttcccgttatccccgagtacaatctctagttctgccagtgcagcgatgtaatcatagctccaatgcgttgtaggaacatcttggaaagcaactgttccacctggtttgatctcaaaggctagcgtcaaaattttagccatctctgcacgagtcagcgaatggtttggattaaaattcccattggctccatcgactattcctgcttgttgcagtgacatgatggcttcatagtaaggatgacttggtgatacgtcataaaacgaaactgcctcacgtatgggttcaaacttgaaagcgcgtgtgaatagtagagccatatgatggcgcttgatgtgttcattcgggtgaaaagaaccgtctggataccctgcaattatcccttgacttgctagttcctcaatcattccttttgcccaatgtcctgaaaggtcgtcaaaagtaacgacaggtggttcaggctcaggtttgggttcttctggggtaggttgcggattgggtgttggtaccggtattgaattttgaggaggcggtggattacttcctcctccgttattgttagaagaattgtttatactccacttcgcatacaacgtcttatccgctgtaatgacatctttcgtaaagttccactggttaagaagggctgcctctttaaaccaaccaccaaacgaataacctggtctgcttggtacagtcggttctgttgcctgttcattgtaaggtttattctgaagcgctaccagacttcctccatttgactcaaaagacaaggtatagtgattaatttcccacgccgcatacaacatgacatcagcttcgtttatatggaaagcatcattcgctacatagcttttcccacttccatctgctttcgtattccaaccaatcaacgtaaatccagtcttcactagacttccaacattatcggcgacggttacactactacccgcttcataggtttgactatctaggggtaccgctcctccagtagctccattcccgtcatagcctacgctatatttaataatggtgaatacaagggtaatcgaattacctgcggcatctgtaacaacaagtacataggaaccttcagcgtccacaggtgagccacttataaagttttgcccgttcaatgttgctgtaccttcattaaaggtaatggttcgggaggaattatagctctctccatctgttacacctgtaacgatcggagctgtagtgtccagtacaatacttgcttcggccgagcccatatttcctgctcggtcgatgaagcgaacataaaccgtcttgctgccatcacctgctggcaatgtatagctcatgcttgcttcataagtctgttcagctgaccatgtagtgtcatcattcgagaactgcacggctacaacatccgtaacacctgctcctaaagtaaacccgagggttacttcacgatctgttgcgtaagcagctcctccattaatggcaactgttcctgtgggtggtacggtatctaatgttaccgttgaactgtactccactgattcatttcctgcaccgtcaataagctgtaaaataatcgccttcgctccatctatacttcctacatctattgtaaagttattcgtatacgctatggttgttggtgctgacccgttaacgctatagcgaatattcacaatatctgttacgcccgctgctggtgtcacttcaactgctacatccgaatcatttgcgtaagtcttaccttcattcacaacgactgttcctgttggtatttcacgatccagtgttacggtttgtgtaagcactgtcgtatttcctgccaaatcagataagcgaatctgcagcgtcttcacgccatcttcctctgtatcctgcaatgtatacgattgtggactagcgctatacactactgaatcgccgtaatcttggcccgtctcgcctaactccatataatccgtattactacttgttaccgttaataatacagtagttgcattcgttacacttggggttataagtgttagcgttcctgttggagctgttgtatccaaaataatgctattatgaattacagtaatattacctgctcgatcaattaaacgtacatacaccgttttattaccatctccagttggtaacgtatagctctttatggaactaaaggcttcaactcctgaccaagaactattgttattagaaaattgtaccgctaccacatctgttacaccgttgcctaaagatagattaagcgttatttcacgattagttgtatacacgttgccattattaataacaatagagcctgttggcacttcggtatcccgtgttatggttctttgatattcagttgattggttccctgcacgatcaactagtttaaattttaagaccttatctccatcattacttcctatagataacaaaaagactggtacataaggtatttctgaaaatggggttccattaatcgaatattggatatgcgtgatatcagttactcccgcatcaggacttgttgaaataagtacagacgaactatttgtgtattggttaccttgatttactatgaccgttccagtcggaggggtcttatctatttggaattggatcgtttctgattgactgcctgctgtaactgttagtgtatatgaaccttcagcagtaatttgtgttccacttgtaaatggacttccattcaaagttgctgtaccgatgttgaatgttggcgttggatttgtattgtatagaccgccatctacgactccagttatttcaatattaacaatttcagaatacgtaataatcaaatacgggcccaaactgccatcctgtgcatgattttcggtcatttgtataaaatgatcagcatgtgttattcctgcttcagctgcttcttgagccgtcatacccgatagaatgaaggttgctctaggatcaggttccgcggattcccttgatatgtagctagtaaaattaaacggagctaatgtaggtttaagttgggggacattattggataataatcttgattgtgtagaacctgacgttggagctggtggcgatgttattccactatcctgtgcccagctatgatttgtactcgttgaaacttttagcgaaaaattagttgttgcctgaaaagtaccacctgttacaggcagatacagactcgcagtttcaacttcataccctgcagggattgttggcaaattaaactttagtaatacctgagcctctaagggaacaccaaatgttccttgatagcctacatccagatacccgaggtttccatcctcataaatcattccagactcataaatgatagttgtatcctctgctgcaaaaataggtgacgaaactacattggcagaagctaaactttgattattaaaaattacgataaatgccataaacacgattacaacgagcaagctcgcaatcgagacaactctctttctcaccatgtacacttcctttcatacaattcgttattgttcataatgacctcttttcatttgactccatctaaacatcatagtctcgtcagaggatatttaagtcctactaaagtagtactccataaaaaagatcgtccgtcttaacaaacaaggaagcggccccttaaggctcgcttccttgtttgtcactctatcaattgtagctctctggcacgtaggacagcttgcccccgccgttttacacccaacttgccgtatattctagatgtatgtgtcttgaccgtcgtctctgcgatcccaaagagttcggcaatctctctgttcgacaagccttttgcaattgctgttataatttccgtttctcgttccgtcagcggttcagtcagccctggttgactgggactaggaaccacagacgaggcgttactttcgaaagcactcgggattgttgtattcgcagcttcgtcttgcagcagtttgagatatatgatccgtgtcgcaaaaagctccaacatctgaacatccctctttgtgaacacacccggcatctgtcgattttccaagtagagtagataggaagtttgttctcccggagcatcaatggacatgcatagaatcgacctctgttttcttgctgcaatataagcatccttcacccaaaaactctgaagcgcatcatgcaaaattagcggttttcccgtcatcgttgtatgacgtaagacgctctccgcatacaggccggctccgttttcctgatcagtccagtcagaacgactagcttcaataacgaattcattattttgacgcttcaacaacagaccacgctctgctccggcttgtcgtaaagccgtttccaatagatttaccttccaatcgaccttattctgctgtgctaacccatggatgagtcgttgcaaaagctcgagttcctcttcactcttcaagccttcacccgtcttggagccgttctggtgaggtaacgatgtgccggtttgagtcatttggattcgatcctgtaatacaggactttcataacgcttgtatatcgggtccagcaatttagcatctctgcttctaatctgagttactttgaaggtgattccccattcggcgtatgccgcacatgcatccatcatcgtaattgccgctccggatcggctgagcagatcatcttgataacataccgcaagccgttcgcaagcaatggcttccagcagcacgtatttctcgattctcgctagcctgattgcagccgtatattgttgcatggcgcccaccgaattccctgagatccgttcagcctctgctttgattagcaagtatgcggaggacgtactgtccaagaatcctcgccaactcttcattaatcgcaattgcgcgcgtatggccttccggatccgcttacggtcctctctattcgtctcgaaataagatccagttaacgccaaagcctcgaaaacgcggtgtttacgaatttgcatccaatccagatgtaattcgtttccccttcctcgctgcgaccaatatagcgcttccttgtacctgcccgacagatacgccacctcgagccggcgaccacagctatagttatcctcgtcctgttgctcaaactcgctgtcagccggcacttgtggaatagtaacaaaactgtcgatcaaagaatcgtcttgcagcactgctgcgtaactgctcgtcagccgcatcatgtccagtatcttgtcgtcggcaacctgtcgcatgttctcctcaaagtattggagcaaatcattcagggcatatacattcccatgattacacataacactgaaaattaaggcaggattagcaaagtcatgatcaccggcttccatcgcttgacgcatcgcaatgaacaggacaacagaagattccaaaggactgtccatttgcttgatcattccgctcagaaacgtaaatacatgctttttcctgaatgtagaggtgttggcgatttgcaagaacacctgctcagcaatcggagtcgctcgaacaaagctcggaaatgacctttgcacaatcagttcgtatgcaccgatcattgcggctagggactcattcacccctttatgcaacccataacgaataaatcgggcatacaattccagaagcgatcgcgcatcgtgtgcaagcaatggaagaaacaacagctccattacatggcacaattcttcataatcctcatcgagtgggtcggacagcagaagatgcttctcccgttttcgatgtaagaggatcgcggttcgggtcacttccttgcctatagacaacagtgtacttttcttctcaagcttccaaccataggatcctagcgcctccattccaaattgaaccgcagtctcattgtccgcgagtgcatggaattggattaaaggtgcccagattttgagccgctctgatcggctcagtcgatcgctgtcttggttcaagtccaccagcagttttttcgcccgtgcactattgccacccatatactccgtccatgctaataccagctgcaatccgatatcgagtgtatctggtacatcaactttgcatgttgccaacagatgaagcccattttcggcataatgcttccctttcgcataacgcgcggatgtcaacgcctcttgtcccgcttgaagattgtgctcgattaattgcttcgtttcttgctccgataataccaaagcagccaagttcagatgatcaatcgctgttcttgacaggtcatcacgcgactctgacgtgcgatctagtagcatacgtccaattgctaggtgtcggtggatattgcgtcctgaatcgaaggcatatgccattcggtgaatgaactcatgggcaaacacataagttgaatcctgtccatgttcttgtcctgcttcgtcttcctgataaataaatccttttgcttccgcctcttgaagattacggaataccctatccactgctatgccacacacttcggccaagagtgttaactgaaataccggacctattgcagccgccatagcaatgaactccttccgatcttcctcaagcttggagaagcttatctccagcagccgtagatgttcttccgacctgcttcgttgacgggttatttctgagtcccatacccactgacgtcgttcctcgtcaaagtgtagtctgttctcctttaaccattcctccagtaagagacgaaccgagccgggattaccacctgtctgatcatagacagaccgtgccagaagttgaatgcgagcggatttctcatatagaacatcagagatcagtttcctcacatcctcgtaatccagcggaagcagagtcacttgttcctctggattcgcacggcatctttggcttaaccaaatcagaaattcctcttgatcagtattcgcttcatcctcagcggaagtgatcatctcctccgtacgataagccccgattaggaataatccatgcgctttttgtgataatgcaagttctcgaatgacgtcttgtgtacctttgtcgatccactgtagattgtccataaacagaacaagcggtggtttgcattcagccatacaacagatcaagtcgggcagtaattcttcaaaccggtcccagaccttcgcagcgtccgagatatgcgatactttcgcatcgttgttgaacaatagtttggcctcgggccagcaggagacgattacctgcatttctggttcgaactcggcttgaagtttggatttcagacgtgtaatgatttcaaccggctcactccacagttgatagatccattcccgcatcccctgaaggatcggaccaaaccgcatgttttgttgagaaggttccgctttcatagtaatcagccggcctccatgccgcacgacgttttgttggattctatggacaagcgtcgttttacccgttccctctttgcctattacccaacgaaaggcattcattccttgaaaagcctgttccagtccggtctccatttgcaccacttcggcacgacgtccataccacgaatcggatagggaaagcgtccggattttatcgaaacgtcccacttccaatggcgtaaacactccatcgttatccatcatgttctgatacaactttagatcgtcaagcaccccatatgtactctgataacgctccacctgtgatttggcaagtaattttatcattatcgcttgcagtgtttcgtctaactccggtcgaatatcggataaaggatgaggaaccttacgggtgtgtacggtatcccagttgtcatcactgtcagcatgaaaaggcaattgcccggtcaacaactcgtagagaataacacctaatgcgtagagatcactgcgttcactcggcacgagattgagtcgtgcaaattgctctggagaatgataagctgcatgactttccgtatgccaggttatatgcgccgttttcccctgccactgcacgctgatatggtcagggctaaggtatccaatgatcctattctgctcgtgttcacgctgcaccatttcggccagtataatagatagttcaatgaacatagtaagctctattgggggatctgtgatgtagtctcttaaaatcttgatgttcatgcacacctatctaagttatatttcgtttcgggaaaaggatatgtatcagaatttaataatcaaaattttggtttgatgaaatggatttattaagatacttacttaaatgaattttaatctatgatgcatgtagagtctagcttacgtaatataggaagaggaagcagacgttacgcttttaaataggtatgaatggttagaacttaaataataaaaggcgtttgctcaatttctgagcaaacgccttttattataatgttattaattcttggtctagtaatctgtgatcagtgttattagatcaactccgatttttttagcagtcattgaataacgacggcaacttcagctcgggtgatagctgctttcggtgtgagtgtggtggcgctcccgattaggttcttcaatagttgttggaaccgctaactcttcatcgttcatctattcagacttcctgtccggtatacttttctagcgatgcataaatgccttttttgcgggcacgcttgatgattagtccaaagaggcagcgttgcagccagagtggaataccaatgatcagtgtgttttgtaatgttaatactaaagcggtatgggcgagagatttgggattgcccttctcatcggttaatccatcgtacataagtccgtaatgaatgcgtacggattgctcgaacttgcttggtggcgttaatcgaacgcgaaatacaacaggatgatcgtgatcatttgtaaatgtatgtggcgttctgagcggggcaacgcaacgttctccagtctctaacaagtgctttgttttacccaaggtaactgtgagcgtaccaacgatcacttcaaattcctcttcgaagtgatcatgaatatgtaggggtggacctttgccacgtggtggaagtgtgacttctattaataaatattcaccgttcgtatcctttgccgtctctataaacgtaatttgttcacctgtcactttattcgtaaccgtttgtttcactgataatcgctccttgtattcattcattgcacaacaaccgataaaagtatcctgattgtcttcgcacaaaaaaagctcctataattcaatcccatctaacattgtagagagaaatataggagcttgtagtcatacgaaagtagtacactgccatgaaaagaatgataacttactactgtgagcaatttgctcagccacagttaaaggatcaacaaggctacttgttcattttaaaaggtttgtattttacgactggattatttttgtgattccgattaattgatcaagattgtccgctccaactgagcaaacagtatacattacatcattcttaattaagtgaaccgttttttcttttttcaccatcttcaatgacaatagtagcgccattaatttcttgagtagaaacatgatttggatcataccaagattttgctaactccacagtggcttgtttattctctagaacatcctcagattgagaaatgaatatttcttgtccttcagccaatcgataagtaacataaacttcttttccatacatattctcggatgcatgaattgcagtacgctctacaatagggttactctccgtatcatttgtagacatattccccaccgcagaaggagtatacaaatttaaaggaatattgacttcatcaatctcttccagttcaaattgcttacgcttagcaagttgagcttcaggcgttccttctagttttgttcccttttcaataacaggagaaatatgcacttctgttgtggaagttgattcataaattttgggagattgctcgtccaagcttgaagcaaatgcctgattataagcaatgctagcaccacctaacagtagtgtagctgttgccagcaacgtaagaagtggatttttattttccatggttaatgctccttttgctttttaatttattgtttttcgttttaatgccttttgttaatgatgaacaatcccaaagaagtcatcatcttacagctttttttctgggttttatagaaaataacgtaatgagttcctagaaagttgtgagtttctttagaataaatccctatcttccgtagatacatcgcattcttatacgataattaatatacttttagttgtggcgctctatcctgtcgggaagatgacaaaagtcatccaaacgaatgactttgttcgcttataaaaaatttaaatatcctcgatacttaggttacacaaaaaacagacaaggtgcttactatgaatgtattatctttaacaatctcgatactaattgtcctgctaattttgagggggggggtaattccgatcttatatatctctacatctttgtttgagttgtttgaccctgcgctggtgattacaactggcagaattattagctcggttgcaataggtgcgattctatcgatcccatcaattctggtgacgcaatttgaacggaaatcagatggcgggatgtattataaaagaaacgtatctctctatgttttcatcgttgttatctttgggatccgcttttttgacttcatgttcatcacagacattgatcccaaaacactgggattcctgaataatgtaatcgccctgtttatcttggcaatcattacaagttcttgtccttggctagggagaagaacttgtatcgataaaacaaaaaaagccgctatatagcgacttcaaaagggccatcttctttcccctcgatagagcaaagcacaaaattgggattgagtattaatttacgataattctactccagatatctaccattggatcctccgctatttgcttaggtacagtaaaccctccaatgtttgtaaaagatattcctaccggacgaagacactctgctacatactctgaacagatgtattcatcgtcatcttctcgtctacctatacccgtagtaagccttaacgctatctttgctaaatctttggttccatattttttccccaataaatctagggctcgttgcatgatacgtaacgttgtggctttttctgtatttgggctaacgagtagatcagaaagaatgttatgtcgaccgataaatacatccccatcataaggcttatttgtattgttataattttgtacataggatgataacggcaccatgtgcacgccaattgtttcaacactttctagaaccataagacgatcgtggaaccacatcagcaaagcaacgtgactataaggggaattggttgctttttttattaattcactcattggcccgttaccactacaaaatagaaaatctccatttttaatttgatctcggatatttagatattgacttgactccatgaccatacatcccttcgtttcgtttgccttttaacatacccagcaatcaggtcttctattatgttcttactcctcgacacgggtcccctttcacgcaactgaccgcaaataatgcgcatccctttggtcaatcatccaaacaaagtcgtaattcgctggtaataccacttcgttacgttatttttctgcatgtacgcacgccatcctaccagaaatgcagaaggtcaacgctatgaccaccacgtaaattgaaatatgatagcgagacagcacatcacgcaatagatcgatctttcgttttcccagtaatctcaaatacttaaattgtcgagcatgatggtgggatcccgtcgttcagttgttcaagtttatctgcgataagttgaatatcttccgaagcccagtattctcttgtgaaaggtagcttcaccaacgaattaggagattcatcacgttgacttaataatgattcctcatttataattcgaacattaagagcctgccagacatgacttaccatggatgcctgggatatcgatctgtaaacaaactcaaactcaacagtgaaagatgtgaatgcattatggttaaagagaaattatattacggtaaagatatcgaggttatgtttaattcggatgtctgcattcattccggtatttgcgtaaagggcctccctgctgtttttgatttaagcaagcgtccttgggttgatcctgatggtgacacttcggaggccattgcccggcatattgacacatgtccaagcggagcattgacgtataagcttctggacggtgaatattcaacaaagaaagaggatgaacatgcataacgtagaacatgaacctgccaataaaagatttcttattcaagataacggtgacattgctgcggtgatgacctatgtaatctcgagtccagagctatacataatcgatcacactttggtggaaaatgcttaccgaggacaagggcttggcgatgaacttatcaaagctatggtggaatacgcgcgggaaaacggtattaagattttacctctatgtccgtttgccaagggacgtttcgaacgtatttccgaatacgcggatgttctccatcaataaaacgaatattcgcagctaattttcatgtggttatacaacaataaaaggcgtctatatcattttctgaatgatataggcgcctttttctttttacgtatcctactttactttactatatcgcttaatccaacaatagtttcaaacggtcgcaacaccagtggcagcaagccattctcatagttggtaagccagatctctgagaagttgaggccaagctcatcttcctcaagctccaccatgtgttcagtaagattgattactaccagcacctgttggtctgccagtgtacgtgtatatgcatatacactcggatgatccggcataaggagctcatagatcccataagtcagcgtatcgtgctcttttcgcagctgaatcatttgtttataaaattgaagaatagaacgtggttcctggagttgtttctctacattaatattgatgtaattgtcattcaccttcagccatggtgttccactggtaaacccggcctctttggccgaagaccactgcatcggtgttctggagttatcgcgactcgaagcccagatgatgttcatgatctcctcatgcgacatcccctcatcgcgtttgatctgatataaattccgatcggctatgtcgttataatcctctatcgaagggaaagccacgtttgtcatgcctatctcttgcccctgatatatgaaaggggttccttgcatgaaaaagtacatggctccaagtgctgtggcactttcataccaatactccgtatcatttccccaagatgaaactttgcgaggctgatcgtgattttcaataaataaagcattccagcctacgccttccagtgatttttgccacttggtcaagacgtttttcagtttgggaacatccagttgcctgtctgtactgtttttccaaaggtccaggtgttcgaattgaaagaccatattaaatttccctctgacttcacagatccaatccagcagatcttcttggtcctctaccttaactccatttgcttccccaacagtcacgacgtcatatctggataatgtgttctctttcatttcttgcagataactctggattcccttcacattcatatgcttttcaaaagaagagatgtatttgacgccttctcggattggcatatccaagaggccctcttctttgtgaatatggctgattgcatccacacgaaaaccatcaatccctttatccagccaccaattcatcatttcatatatggatttccgaacttcctgatttgcccaattcaagtctggttgtttcttggagaacagatggagatagtactgtccggaagcttcatcatattcccatgcagaagcgccaaagatgctctcccagttatttggttcgtctccattcttcccatctctccagatgtaccaatctcgtttgggattatccagcgaagctctggattcaataaaccacgggtgttcgtcacttgtatgattgatcaccaagtccatgatgagtttcatgccgcggtgatgcacttcatgcagtaattgatcaaagtccgccatcgtgccgaattcatccataatggaacagtaatcactgatgtcataaccattatcgtcgttaggtgacttatacatcggacagatccatatcagatcaataccgagatcttgaatataatccagtttagatatgatccccttgatgtcaccaaccccatctccgttggaatccataaaacttctcggatagatttgataagctactgcttctttccaccatactcttttcattgaatataatccttctttcttgagaactgaacattatataacgtattatgctttaattatgaataaggtacattcttgcttcatatggacgtaattcgctctccgagagttcacctgtatagttagctgtcaaaagctgataggaccctgttaattgctcctgaagcgaaagttctgtcgtaaatccctggaaattgcataccacaagaattgtcgtactattcaacgttcgggtataagcaaacacgtctgggttctctggaaagatcagctcataatcaccatatacgatgacttcatgatcttttctgagttggattaacttccggtaataatggaatatggattcagggttattcaaactttcctcggcatggatctgcgtataatttggattcaccttaatccaaggttccccttgtgtaaaacccgagttatcggaagtatcccattgcataggtgttctcgcattatcacggcccttggcgtagatcgactccatcacgctttgttcaggataacctttccccattctttccttataaaagttgagcaattcaatatcccgataatcctcgatcgcatattgaacattcgtcatacccaattcttcaccctgatatatgtaaggcgtaccatgcatgccatgaagaagggtagccaacattttagccgattcaactctgaattctccatcatttccccaacgtgacacgattcgaggcaagtcatggttgttccagaacagactgttccaggcgtcacccttgagctctgtctgccatttggacagcactgtttttaatgccatcacatccaaaggtttaagatcccactttcctttgccttcttgttcatccaaactgatgtgttcaaattggaagaccattgaaaactcactgccgtctggattgctgtacagtttggcgatttccggagtggcgccccatgtttctccaacggttagcaggtcttccgctttttgaaacgtctccttgctcagttccctgatatatttatgcaaattaggtccgtttcccgtaatcttcaaatccggttctttaccgattaagtcgatcacgtcaaggcgaaaaccgcccacacccttgtcgatccaccaattgatcatgtagtatatctcctgccggactttggggttttcccagttgagatcgggctgttttacggaaaatagatgcaaataatattgcccgatctcaggcacccattcccaagctgaaccaccaaaggtagaccccaagtcgtttggaggtgttccttcaacaccatctctccagacgtagtagtcatggtacggattgtctttgccttttttggcttcttggaaccaggggtgttcatccgaggtatggttcaacaccaagtccataatgattcgaatgtctcgtttcccggcctcctgaattaacgtttccatatcttccaaagacccaaacatcggatcgatgtcctgataatctgaaatatcatatccgtaatcatcttgaggagacttgcagacaggtgataaccagatcgcaccgatgccgagttcctgcaaataatccaatcgggacacaatgccctccaagtcgccaattccatcaccattacgatcttgaaagctgcgtggatatatttgatatacaacggtttctttccaccactttttattttccatgttccattcaacctttctaatgttattctttgaccgatcctacgacaatgccagtcacaaagtatttttgcagtaacggatatatgagcaatagcgggataacagcaactacgattttggctgcgttcaggtttttgtttgaaatttcagtaagattgctgagttcactggaattcgtgccggcttgaagcaaatcggcaatattcacgttaagggactgaatataggtcattagcgggtaattgctaactttggtcatatagatcaaaccactgaagaagtcattccatgtacccacgatactgaacaaggctactgtcgccagcgcaggaatggacacagggacatacactttgaacaagacctgaatgggatttgctccatcgatgaatgctgcctcttcaagcgctttaggtacagcggagaagaaattcatcacgagaatgacactgaatatcgggacagcgcctggcagaacaagtgcccagatcgtattcagcatatccaggtttttgatcagcaggtaactgggaatcatgcctccactaaacaacatggcaaaaatcatgatattcatataaatgtttctgcctttaaaatccctcttcgatttggatagcggataagccatcaaaataatcagaatcatgttaagcacaagggtaagcgcgacacgtagaacagatatgccaaaggaacgccagaactgtgcatcttcgataattttggtatacgctgctgttgtgaaattaactggaacgagacctactgcgttggcggataccgcctcgctgctgctgaatgaaatggcaacgatattccataacggaagaaggcagaccaacgccagcatgatgacgatggcatagatggcaaaccggccaattcgatcttttaagtttgcagaataggacacaggtttggcctccttagaatatttttcggtccgtatattttttggccaactggttggcagacatgagcaaaacaataccgatgacggacttgaacaagccaactgccgtaccgaagctatactgtcgtccaacgagaccgatccgatagacataagtatccagaatgtcgcctgactcatagacaaccgggttatacagattatagacttgatcgaaaccggcgctcaaaatgttggtcaagctcattacgcccatgagcagaataataggcagcatgcctggcaatgtaatatgccatacttttctccaccaactggctccatccattcctgctgcttcatacaacccaggatcaatcgacgtaatggcagccagatagacgatagaactgtagccaaactctttccatacgtctgtaccaataatcagtggctggaaccaggtgttgctgccaaggaaattaatattttcgaggccaaagaacgccatcatttgattcacaatgccatccaaactgaacatgttgacaacgacggatgccagtacaacccaggatagaaagtgcggcagataaacaatcgtctggacagattttttaacgtatttgatacgaatttcatttaataaaacagaaaaaatgatggccatcatcgttccgagcagaatcttgccaatcgcaatcaccaacgtattgctgacgacctgcgcgatatccggcagcttgaacatatacataaaatgcttcaggcctacaaattcggagccaaacatgcccttggccggtatatagtcctgaaacgccgtaatgatgccgaccattggaacatagctgaatacaagcaaaaacaaaatgcccggaagcatcatcatatggtacatggcacctgggccgagccgccctctcgctttccaattcccctgtttcatggatgaaccccttttctgaagaaaggctgcgtatcgcagccctgctactgttcatggatgtttattttttcgatgtgatctcgtcttcaatttcctgaatgacttgatcaccaccctgtttcttccagttactcacgaatgtttcgaaataatcgagcggttctgaacccgttacaattttgataaacgattcctgttccaactttgtcagattggcccatgtctgtttcatacttggcgtagtgccagagtaagcaggtgtcatccagacaaatttgttttcctgagtcagtttgtcaatcagtcccactccgttgatccgcgaatgatatttagaccaagcagtcacatcatcggtatccatgtcacttaaataggttttgatgcttccgatattgttcttcgattctgtagtgcgaacctcatccaggctgatctcacctttaatcccgcgaacaacctcagagtaatcatccagcagcgatgtagccgaattgacttcgatattaaacggtctcgttgaaccgtctacgcccgtctcctgatacttggcagcttccggcatggttgatgcggcatctttatcattggccaatttatcgtagaacaggtttacaattttaaccgccagttcagggtgctcatatccctttctcaccacgataaactgattggatggattggcatgcgccacgttgaccttgccatttgcatcctccagcgtataagccgaaaatttcgcatttttatccatctgttttgcactgatcagtccccagtcagggatatgccacggtccaaaggcgataccgctttggccattggcgtagagtgcagtaatatcatcaaacgtgcgggttccaaattgcgggtcaatgatgccattcttgaaccaatccgccatggtgcccagcattttcttcgtttcttctgtcgtggaaccatacacgattttgccgtcttcaccattcatccaatattgcgggaaagctccctcggttgaggccacacccagcatcgtataagcagagccattataatctgttgtgttcatcgtgttcacaaatggaatacctaccgggttccctgattggccaggatctcttttcagaaattccagcgctgtttgctccacttcatccagtgaaagggcaccgtctccgtctgcatccagttgaatccccagcagatccagccaatcttgacgaacccaaaccatcgttggtgcagaatccagggaagtcgccggaaggcccatcaaacgtccatcaatcgttgcattttctaatgcacgtccatcataggaatcgtacatctgcttgatgttatccgtagcatattgatcgtaaatggacgtcagatcctcaatcagatcgttatccaccagctctttcagttcatctttggaatcaacacgcatcatgtcaggcaattccccggatgcgatggcaagcgatacttgacgactataatcttcaccattggcttcaaattgatctgtaatctgagcgttaaacgtgtctttgaccagccgagtatatgcgttgttctcataggtatcaccagccggcagttttggattggctgtggttacccgtcccatggttacggtaatttcgtctttataggcactgaacggatctccaggcgttacctcatatttgcctgcttcctctgcagtaggaggagtggaagagtctccacatgccgcgagggttgcaaccatcaaggcagacatggacagcacagcgagacgcttcgtcaaccggttgcttttcatagaccattttgttctcatctagttcgattcccctttattctgatgttcaacatatttgtttacgctttcattataaattgaagtgaaggccaatcgagatagggattacacgtccgtttggatagagaaatggttacagttttcagaccgtatgatgaagtatggttaacttgtgatcatttaccctacctactgaccaacatttgtctatctacccctcttctcgatcaaaacaaaagccggcagctcctaaaacaggaagctgtcggctatttatttcctctacctagctgccgatattcgcttggcagaagacctgtcagttcgcggaaaatccggctgaaatatttttcatccgtataacccactcgctccgcaatccagaaaatcgtattattcgtattgagcaagtactctttggatttctctacccggatgaagcgggagtactcattaaaggttttccccatcagatctttgaaacattgactgaaataacttcggctgatattgagttgttgggagagacctgaagctgtataggcctgttccaaatcctgctgcacgatcatcaccgcttttttcacggcatcgatgatttcctgtgagtacgaagtctgttcatcagcctttcgaatgcttgcagcagtctgtttgatccattcttcaacctcgtaccaagactcgaaagaatggatcatcgagattcttccaagcgtagtttgggcaaaaatacggttccattccatcacgattgagtacagcaatcccatcaactgacctttatgtaatcgtaaggatataaactggtcaatgagttggttatagtaactctcatggtgggtccatggggtttggaaccaactttgtttaatccggtcaaggtcctcatcttgcggttcatttgaacatgtatcttcctcattcatggaaatggtaatgacttggttattggggttgtaaacatagaataaagacgactctgtataattcataatccagtttttgatttgcgaccatgttcgctcttgtacatcagacaaaaccaacaacgtacactggggaacttgatgcaggcattccttcaattgatgaaatagttgatcctcttcggacgggggtgcagcccacatgcagctattacgctcaacctcccatctaatctcatcttcatgcgcagttagctccattggccacttctgctctgatttacgatcctgtgaaacaagtgcatacacatttcgataatggacattgatttcatccagcgatggcatctttcttatcgtgcttgtcaacccgttaattcgggtatgaatccgttgcagaacatgttcgaattgctctttctccagctgcactttggctatataatcgatggctccgagtcttagcgcttcctggatataatcgaaatcctgatgcagtgttaacacaacgatatgaagttcaggatagagctgccttgcagctcgcatcagttcgatccctgacatgacgggcatcgcaagatccgttagcatcagatcgaccggttgggttttcagaaaatccagtgctttcgccccgttgcttgcttcccctacaacctccatgtcgaactcgttccatggcatcgcagagctaatacctttgcgtaccagcttatcatcatctacaatcaataccttaatcatgccgagatatcttctcctttaataggcaatacgagcagtatgtttgtccctgttcccaattcactctcaatcaccagttgtgcttggtccccgtactgtgctttcaacatgcggtgaacataattgagtccgatgcccatccctactttttgttgttcagcctcacgattgttcagcagattatgaatggtttcctcagtcatacctgcgccattatcttgtatcataatgttcaacgttgaagtgcatgtcacttcaatctgaataaaaccttcgtcacttaatccatgatataacgaattttcaaccagcggttgcagaataaagcggggcacaggaatttgaagtacttgttcatctgcagtaatgcggacgtcaaattcaaagtcatagcgaatttgctgcaaaattagatactgtcttagggcatcgatctcctcttccatggtggatacttgccctaatttgcctagattgtaatagagcagcttgttcaatgactgcaccagcttgtcgatctccccttgtccgttcatgacggccagccagtgcaccgtatcgagcgtattcatcagaaagtgtgggttgatctgatagagtagcttttccacttccagatctgcacgaatcttctctttctgctgtacttccttgaagaggtcaccaatctgatgctgcatgttcgaaaattcacccaacagaaaatcaaattcgggaatctgagtgcgagctcggctcccttttgtttgtggattcttggacattccattgatctccgaatgaaacagaccgagtggtttgtagaccatcttccacagaagccaagcaagaaaaacggtaaagccgaggaaaaataaagcgaccagcaatatttgaagcaaccactggtttttctcctgttgatattgagactgcgaaatgaccgatacgacactccatttctgtgaggaatcctccttgaaccagtgatacccgcgggatattccgtccttggcaggatcggccgttaagctggtgaaattctcccctaacttcatggcttccggtatttcgctgtacacaatgtttccttcaccatccaggatgagatgagataatgcgccgttgtattgattgtaacccaagatatcctgtgtaaggcgaaatccggattctacgtatatgtacacgtcgtctcttttgggcagttgtacttttcgcatggcagacagaacgagttggtcatcaaaccggttcatgctgatatggggaccataatacttaatgccataagtttggaagagcactggcaaagattcaggagaaaaatgatccttaatcggaaagttgccgaactgcgtagtgccttctttctggaaataatataaggtcaatccgatattcggattggtaaatgtgaccacacttaactcgctctttaattcgtccctggcctcgattaattcgaagatatcggaggacggattcaaaaattcatccaaccttttgcctacagtaccaccgtaagacaattgctgtgtaacgtgattcagattggtgatggaattctccaatgaagatgtcacctgctgtaaattgctgcgaatgccatcatcgatcttatttgcgaaaatggagtcaatcgtatagtaagaaatcgcaaatatgctgataaaggggataaacgcactgagaaagaacaataaaaagattctttttttgagtgtcatggggaccgattctccttctggaaatgaaacagcaagcctcctgcgtatggggaagcttgctgtgaatatacatacagctatgccggttatcgttttctccataggcctcgaccaagtccaatttcctttcatcattatagattgatatttaaataagtcaaacgctttcatattgtgcgtatataaaaagtgctactcctcaaaatgatgaggaatagcacttttatatgcgtaccttacttcagttgtaatcacttcttgttattggaatgctcaaacatttcagtctactctcttacagtcacatttaatttgtgtgatctggtttcccctgaagaattacgaagtacagcttcatactcgtagattccaggtgcctttccagagattgcagtaaccgcagactgtgcaccaggagagtgagattgcagcgattgtgtgtcaatcaaaacaccattttcgtaaagttcgtattcggttgcgtttgttccccaccatagattcatggtgacattaaagttgccgtcaccgtcccagttgtcgttcgacagaatagcttgccccggggaagcatccgtgacgattactgtcagcggaacactcatggttgaacccagtgcattaatcaattctccagtatagatataggtaccatttttctttccagtaatatcaacttgaacagattgggcggacggggattgatcgaccagagaaatttccttaatcaattcaccattctcatacagcttgaactgattgccgttattcccccaccacagattcatagtgattgtatagtctccgtctttgagccccgtgtcgtaaccattattatcagataacaccggagtgccaggggcaccgttcgctagtggcgttccctgatggagccattcctgccacttaagcagcacatctgcctgctcatccgagaatacggttcctcgagctgcttgaacgtcattaccgtaggatgcaagcaattgacgcgcttttgctccttcacgatcgtttgttgcctgtttggcctgctgtaacgtgtttgtaagctgatcagcaagaacaccagcattaggatcggtcgattcatcggcaaaggcgttggtcagaataatcaggctgtcgaatgtagcaataacgccaaaactatattctaccgtctgttcccagccagccaaatccgagaccgttgccgtaacctggttcaggccgggttccagtgtatacgcaggagtgtcgagaagcacaccctccggttcttctacaccggataccgaatcggaggctgtatagccaatttccacctgctgatcaatggtgtactcggtttgaccatgaatttcaatggttggaggtacgagatcaatggatatggacaaagactgttcactctctttgttaccgtcaacatcgacactccagtaggtgatggtatgtgtaccttcttcagttagagtcaactgtgtaccacttaccgtttcgccaccattaatttgataataggtcccttcaatttcggaatcttcatcgcttgctgtgaaggttacttgtgccggagaagtataccagccgttctgcaattctccttccacagttgccgtagtatgcggggcctcctgctccggagattctccttccaacgtaacaaaatcagataaaggtatattcaattccttcacaaggcgtgctacgagttcagacaccttgattgcaccgttcatttgcaaatgtgtattgtcttccgttgtgcctacccacatgaatatcgatttggttccttctgtgccaagctcctggaaatgctcccaactggcttggttcagatcgatgataagcgtttccgtttcctgcgccgtttctttcatcgcctgtacgtattccgggaagcttttgttcagcacttctccggtaaaatcacgacgattcactggcgtgaccagaactggaattgcccctctctgcagagcaccgttaatgtattctttcagatataccttaaattgctctggtgtcagataacgctctggacgtgaaggtgtggaatcgttatgagaccactgcatgaacagataatcgccttcttgaatgtcgagtaaaatatcgttaagatatccaccgaccaagaaggttttgctgctcaaacctccaactgcccggttatcaatactgacttcatttggatcaaaatatccacccaatgtttctccccagcctgcttgcggacgatagttttccgcgtaattggccacagtggaatcactggccaaataaataactggtttatcgcttgcactgtgatctggcagtcgctccagctttagcgcattgattttcggtgcatttccggtaaagttgaagttaaataccccatcaatcagggcaacgtcatacgtgatttctttgaattcgcccttggcaatgcttgtaagcggcagctttgtcatctgctctacaaccacatttgcactggttgattcctccgcatccccgatggtcatcgttacccggtaattcgccggctccatttccgccaggaaagaggtaccgtttactcgtgtgaaatcttccttgagcaaatctccggtttcccggttctcatctttggtcagcgcagtatcagcaaagccgtacccattgccttcaatgtacgctcttttggcatctaccttgatgtatccgtcggctgcgccgccagaaccaaagtcaaatttgtattcgcttatctcttcgtttggttcacttgtcaatgaatccttcgcaacagttaacatgttaaacgtatggtcaactttagcctgcgtggcttccgtattgaatatagcttccgcagctgccaaagcccggttcaccacggccttcgatgcatctgtataatccgacagattcagtgctttgatctcatcgtacagagcgattaaggcagtctgatcgccactctccgaagagagctgagtgccttcaatccgcacgttatcgatctgggtagtccagttcaacgtgcctccaccgccttttcttgttcccaggaaccgcatggatctgacgttgtccgcatatgcggcggaactcagcgagatatctgcaatcgtttgggtaactgtcggatcggctaggttcgttaatgtcagatccaatgttttctcggcaaaattaacggttgcatccacattgacccactggttcttggaaatatctgtagccgttcccccttcgggtatggccgtatcccctgtgccgtattctgggttatatgcaccgacaaaataatgaattttggtgcttccggttttcgtaaacaatgtgaaaagggcattttcgttcgaatcctggaccgtgagatgaccttctgatggataggcactcacattaccggattgccagtcaaagttcacgttcacctgatcgccgtttacagcatcgaacagacggaataccttggcccgattgcccgatccggaacccgcgacggacagtaccttatttccggactggtcaacaacagttcccgtcatggttcctgcaatacccgtggcattgaccatcgcatattggtagttggaagcgtcgccttcaaagtcctcctcatatagctgggcttccggctctggttctggctcggaaatatccgggtcgatgaccagtgatgaaatgctcagctccatgtctttgacagcaccagcaacgagtccggcaattttctgtgcaccatggctgctgaagtgcgtattatcgttgatcccattcgggtattttggatattcacccggattagcatataggaacactttttccgtagctgtattaccaattttgtcgtagtaagcaatactcaacttgctgagatcaatcagcggcacgtcctgctcttccgccacttctttggcagcttgaacatatgccgggaagctgacgttgaattcctgagtcactgtattaaaatctctgcgcccaaccggagtgagcaataccggtttagcgccccgctgtttggcaccgtttacataacgagctaagtagatcttataatcctcaggggatgcataccggtctggtattcctgcactggcgtcgttatgaccaaaggaaatgaagaaaaagtcccccggcttaattcgttgcaggattgtatcgagacgaccgtctaccataaacgatttgctgcttcgaccgccgatcgcatcgttcacgatcactgccccattggagaaataacgtccgaattgctgcccccatccttcttgaggagcctgcgcttcactgtacgattgcatggttgaatcaccagccatatagatcgttgttgccgcaccagccgctttctctggatatttctcaatgatgacgtcttgaatgtctatggctgtacccgtgaagagaagatcgagctgtccatccaccaatgcaacatcataggaatactccagtggtgctcctgctgtcacattggttaaggcgagcttctggacgaattcggatttgactccaacgttcgagtcatttgcatcattgcccaatcgcagcgtcaccttatagtttgcatttggcaggtcaacagcaaatgtcgtacctgtagcgaccgagacctgatttgcccctaccgtaacaccacttgtatccttgaagccgtatcccggatcttgtgcgtagagcgtatcctgtatgttcgtacttcctgatgcagtctctgtaccgaaattaaatcggtagaccggctccagcatttcagcttcgcgagtcagcgccagatcggctttagggaatgctgtagcttccgctccaagataaaagccagtatgaggcggctgattgtaggctacattttgccaggctacgccaagtcgatacacaggatcctgcatcagcgtagggatgcgatagtctgaaggaatggtcgttgtgtagagacgatactccgaactatcttcgctccgcagcagaagctcctcacgccagtcgcccagaatgtccgcctgaagtgccggattgcctttggtatggttgttcgttaacgtaccggtcgcccggaagatttcattcagctttttgttttggtaatcccacttatagatgagtggaatacctttggctgtgctattatcccactcatggtccaacagctcccgctgaagatctccatcccaccagatggcgaaattggcggttttgggcccttcgtccacagtgtagatagcctctcctgctgcagaataggtattggttacaggtacactttgcccgttggtaacggtcgtggcccatgattcgtaacctggatagttcggatcaatgtccgccgacatcccgcgaccggtgtcaaaacctgttttctcaccccagaggatttcacctgttgccgcatcgcgcatctccagaccgtatgccgcatccgaatgctcatgcacgcttacgacctgatagccctcccggttcggatcgagctggccggcgtgcatggcgtcaccgtggccgagtccggtgctgtacagcaagctgccgtcatcatcaatggccaaggcgccaaacataatttcgtccttgccgtccttgtcgacatccagcacacttagattatggttgccctgtgattgatattgtgatcctgcttcgtttgtgtcgaacgtccagcgtttgacgagttccccgccaacataatcataagcaacaagcactgtgcgggtataatacccccggctcatcacgacacttggcttcgtaccgtccagataagcgatgccgccaaggaaacggtctacacggttgccatagccgtcaccccaatcgttgacgttgcctcttggcggatcataattcacagtggatacagccgcgccagtctcaccgttaaacagcgtgagatattctggacctgacaatatgtatccgctgtcgttgcgataatccttcgtgccatcaccaatgactgtgccttggccatccttcgtgccgtccgccgtcttgacaacaacctctgcctttccgttgccatccaggtcatacaccattaactgcgtataatgcgctccggcgcggatgttgactcccaggtcaatcctccacagcttggtgccgtccagtttgatggcatcgatatagacattgcccgtataaccggcctgcgaattgtccttggaattgctcggactccacaagaaaacaatttcatattcgccatccccgtccaagtcagctactgaagcatctccagcataataggagtacgttccgccatccttggtccgaccatcggccggtttatcgagcggaataggcagataatcgttatgccagaccgatacaacctccggttgcatttgctctttgcctgcaataacggtggagatctgatattgcgagctgtcgaaaccagtggtgtctacatagttcgtcacatcgcttatgggcgatgcgttcactttggttccgtttttatatatattaaaagcgatatcatctggatcgttgtttaaatacctccagcttaaaaaaacgccgttgtctacaagaaccgcaaccaatccccggttaagatactctgcttggcgacccggcaggctgcttgatgactctgcacgtatcggcgccggaggaacagccagtgaaataaccataaggagtgctaaaaaagagacaaacatcgacttttggatggaaacagttcttcggatcattcgattaactcccccttatctaaaaattcatttttagaatcatcagttcgatcctgccctgcttgttgtcatatgaacacaatttacagccacctcctttttatgttaccgcttacatttatcttacaggtctaaaaaaagacagacaatctaaaaaatgtgacgtattatataagataattgacttttttaggaaggagatgaaacgatggttcatacggtttcttatgcttttcgtaatgacgatacatcaatcatgacactggactctattggatggcagatcgtttctagtgaggaatatcgttgtccaagtgatgatagaccggacccggggcacgtcgtttttcaatacacgcttaatggcaagggttatctggatattgacaatcaaacgctccctttaccgaaggggcatgccctacttgtcaaaatcgcaggagaacattgctattactataaacaagagaacagcgaaccatgggaatttatatggatcaacattcgcggggatgaagctaaccgaatttgggatatgatgcatgatagtgagggacatgtcattcgacgaaacgcggactctcccttgattcaagagttatggcaaattatcaatttgattcatcaagagaaggttacggacaagtatcgcttgtccatgcaaatctatcggtggttgcttatcctggtacagacgagtcgggatgcggagaaggatataggtgccctatccataacaacgattgagaaatgtaaaaagttcatccgagagaattatgcatctccattgacgttggatcttctagccagccattgcgatatcaataaacactacttgtgcaggttatttcagaaatccgagaaaacatcaccgctagcctatcttaaagacagacgcattgaggttgcaatccgactactacgcacaacggaacttccgatttctcagattggtcaacaatgcgggtttgagagtcccagctatttcggcaaagtttttcggcaatatatgtccatgtcgcccaaagaatatcgcttgaataagttagagtttccttatgaggccatctattatgaatagctaacctcgctgtttgctagttgtccttggatttggaactgctcttataccaatacaataaaaaaagccgctagaatagcgacttttaatggaactatgttctttgtgtgcttcgataattgctacacttattgagctgtgtatcctccatctatgatcaggctatttcctgtcatatatgaagaatcgtcgctagctaggaacagaacggcttttgccatctcatctgcttgacccagacgtttcattggtgttgccgcagaaagtgcttgtttgctctcttctgggataatcggtgtatcgataaagcctgggcaaagggagttcacccgaatattctgctcagcatactccagcgcgagcgaacgagtcaggttcacaacgccgcctttagctgcattgtaggctgcagagccaggtgaaccaacccatccgtacatggaagccgtgttgacgattgtacctccaccaattttgagcatttcgcggatcgattcacgagcaaccaagaatacgccgtccaggtcaacattgactgtattgcgccattcggcataatcaagctcatgtgtcggatgaacacgtccgattcccgcattgttgaatacgatatcgacttgaccaaatgcttctacggtttgtttgaaaatctcagaaacctcttcttcacttgttatgtttgctttaataaagagagcctctgctttaagcgctttcagttcctgctcaaacgccttgcctttttcttcattcagatccaccaagaccactttagctccttcggaaacgaataagcgagctgtcgctgcgccaatcccggatgctcctcctgtgatgactgcaactttatcttgaagtttgcccatgaataaatcccccagtataatattttgaatagcgcctatataaatagtgctatatgatgtttacaaaacttattttatgcttaaaattgtaacattccaatcattaagatgtgaccaagtgtctacctcgtagacactttataaaactatgtctatatttataggagtttttttgaatgaataatgaacttattgtgacatctcaacatcgtaatcgaaccaaggagcacctaaaaactgctctgattcagctcattaagaaaaaaggattccatggtgtttctgtcaaagacatcgttgatcaggcgggctataatcgcagcacgttttatttacactaccaggataaatatattctcgccgaagagttgttgagtatgacactcgaaggattgaggggcgcagtaggcaaaccttattggcacggtcaaaaggtttcaacaaacaagctggatgccgaatcttttcaaatcgtggattatatctacgagcaccgtgatttcttcgaactgattcaatacgatgatacgttacccggtttacatacaggctttccacaaaccatactcaaaatctatcaggagcaatttgtctttgagacgatcaacaactccccagttaatatggattatttcaagtactataccgcctacggtttttttggactattaaacaattggatattaagcggatatcgtgaatcacgtgaggcatttatcaaaaacgtgattgatctcacaaaaacgcatattcactcttttcattatgtcggtaacacgtttgaatcttgatctcaagtaagttgatttgtgaacatcacgatgaacgatatgtctgctttagataacaggctagttgcagatggagcagatgctcctgattactcagggacatgcccagacaccaacaggacgtaaaataacaaggggatttaaagcataaataaaaacgggcatgtcatttacacgagaggaatgaaatcctcaagataaatgcatgcctaagtgaaaattaattagatacaagcccaagcggtaaacggactatgtccttttctctagaccattgaacatagactactctatataaattaaatcattataatacgggtcccattctccagttacaaatctagcaatgactgctttttctaaactaacaggtgaccaagactccagttcggaggcaacttcaatctgtgaagcactgggagtttcagtcacaatatcacccttatgatctaccaatgtatatccatcttcagtttcctctttgtacatgggaaatgtcatcctaggtattggagcattaccaatcactttccagataccatcttcaatcctggaggttgcttcgttgtactcacatttttgttttttcattatagattcaatattttcatcatctacaatatacggtaaatccaaattaaatccttttagatacatctggttctctccttagattactcccgatggttagtgcattattaacttctatccaaacttgaagcccaatttttgaagcaattaagcatctcttctaaattttttgctcctcctgcactgtgaaacactccctctctcacgatacagtagaaccaatcttcttcatttctctcttcttcaatcgaatcaattcgcacaccgtatgaatgttcccaatcaccgtcacagttttcataataccagctttgaatccattttagggtatccatcatcgtgacctctttttgttttttctactctaggaacttattatttaaaggaatcctcatgccatgtgtcatacttttttcgtatgaattaccttttagtaataatttgctttttttacgtagggtatacttaaaagcaaggggaaaactttatttcaaatcaaggaggtcattatgagaaaaataatattgtttatcttcattagtatgattatacttgcgggctgttctaacaaggatgagaaagagaattatccagttttcgagggcactgtagtatttaaaacagatgaaaatgacaaatataaatttcttgtactacaaaatataagtaaggaagaattggagaatggaaatcttgaggattttatagaactagcacaagaccaggaagcttcgtattatttggtcgatagagaaacatatgaaacaattgaagtagggcaaagggtaagaatcactgctggcttagaccaactagaaccctcgccacccattagaacggttgtgagtattgaaaaaatcaatgattaaaacttattaaatatgaactattttaagttatgtatcattctctcattcgaaatatatttccccaaatgataaaaagaccttaacgttttaaagcaaaagtaaggtctctttatcattttaatttcaagatcagagttgaatcacgtgcagttaaatccgaccacccggttctctccttttattacgcgataaaccctcccgaaattcaggcaaatcaatactaaggcttttgaggttttttaatcatctctacgccgtcaaaggtaaggctatcaatatccgcatcctttttcaacatatatttatcaaagaacgcctttgtataagaagtgataatgttgcgctgttccatcgcgtcccgggttcctctggatgctttatccgtagttgtaaacaaggaatcggagaagtcaccatggactacattatcaataatggcaaagtaggtgtccttgctgttggattcaagaagaaatgcattcgtattataggcaagtacagtgctgagctgcatgaagggtttcttaaaatcactatccaaggcacctaacatattaccgtcaaggtttacagcgccgacaaatcggtcatcgtcacggctaacaattgccgctgtcgttcctccaaaagaatgtccgaacacacccataccgagatcaagctgcaatctgcctttaaacatagattccatgtcacctgtattcattttgtacaagttatctgcaacatatcgaatatcctcgctctgtaaaacggcatagttagcaaacttgactgcttcaggcgcggaagttaatttgcgagcaatctcaatagcttcttcttcctcaagcttctctgtcacaatttcaggtggggttagggtggccgcttccattccgtatttcgttacttcgtccataaatttctctgacatacccatcgttcgtccatctttaagtttgtacacgccactttcggcatggccgatggataccacaatatagccggcgcttgccaggtcttgtgcgaacaaagtgccttgctgtgggtaagcgcctgcgccatgaacaaagaataaaaccggatattgtttttccttttcagacaaggccagatcgtcgtaagaccatgtcttgaaattggaatcaaaaagctgctcaccacccgcggtgccccctaatctaaccaaaagctcatccctcagtgaatgaaactccggaaatgcatactctgccgttggtttgccctcattgctgtcggacggatagaaaaataatgctgtcagttctctttctgaatggtctgatgctgtgtacttgaagtccatctgtgtacgcccgaccgtataacttcccattggtttcggaaactcattctgtgcggatgcaacgttattttcaggtttcggaatttcctcctgtgttgaagtcccgctattagtgatgctgcaagcggagagcatggtcagtgagagaacagttgccagaatcgttgtcagtctttttttcatcatttctcctccaatttgtattcatgcaactatcataaacggaggagaaaaataaaaaatcgtacaaaagggcaagacccaagtgtacgatcgggcaaatctatgaaatgtttgattataaatgcaatattccacgctctaccgcgacggcgacggcctgcgacctcgaatccacacccaatttattgtaaatactcgttaaatgagtctttacagtccgttcggatatgcccatatcaaagccgatctctttacttcgagagccacgggcaattgcttgaagcacgatcagctctttgtctgtaagagatatcctcgcggaggatgactctttcgccttttctgatgtcttgtgagcaaatactttctcgctgatctccggaagtagcaacgtttccccccgcatcgctgcatcaatcgagcgaaatatcatctctcttcccgtgtcctttagcaaataccctttagcacctaaagccatcccgcggatcatcatttcatcctcgttatatgtagtcaaaataatgatcggtatatccattcctttagctctgagcgctgtcatggtatccaggccgcccatttcaggcatgtttaaatccaatagaattatgtccggattgtaagtatctacccgtcgaatcgcttccttaccgttagatgcttctgcaattacctcgtacctttgattggtttccaggatcagcttaagtccctcccgaacgacgaaatggtcgtccacgataagaatcttgattgtcatgcgttggtttcctcctgctgtaatgggatgcgaacagaaacttgggttccttgctttccgctttcaatttcgatctccccgtccataattcgagttcgttcatataaaccaattaaaccataactaccggattgtttctcgatgaggttggtatcgaaccctattccgtcatccgttatgtttagctcgacttccttttcccgtgcagcaaccacgatttctacattcgtagcattagcatatttagctgtattggccaagcattctcggatgatatgtaagctatgttcgaagatcaacttcggcaccaccagatggggcatcgataaccgagtgacaacacgaatccctgttatatgtgagaaatgttcagcctcttccttcactgctttagaaatatctatgacctctgcagaatacgaacgcaagtcgtcaattgcgcttctcgcttctgaaagcgtgcgctttgcttgggcttttgacaactgaacaatctcgtgggcacgatggttattatcattttctaaatgcgcatccacggcatcaagctgcatgataagacctgccagcccttgtgcaagggtatcatgtaaatcacgggccatcctttgacgttcattggcaatcgttagctcctccactttcctgtgcgctcgttccaattcacgtaaaaacgactgggtccgcaatttggcacgaacttgtttatagaacaaagcagcatagccgattacgaaaaacatgatgaagaagagcgatggtactgtagatggcaaatcctcggtagtcccgagccaaaccagggaggcagaaaacaaggtacagtaaaaggtacataccagaagcaccttcatccgttgagcgtatacgccaatactctgaccggccaaagccgtcaatagacttacaaaaatgagagaatgagcattaggcatgaataacgcacacccccagacaatacatccttgtgtcacaaaataaatccagggtcttcgatcgacaacgtatccggcataccaatgcagcagaatgtgaaccagaatgagagctgtaaacatcataaattcaaaccatgtgggcaacatcggtagctgggagtacaatgcagaaaaataaatcagaatgccccagatcaaagcaggcagacgagaatcacgcagaacattttgaatatcagatcgggagcttgtatacggttggtttatcgaataattactcatgcttgatcacctctatcaggtactatctcaaaacaatcttcctaaacacaaaaaaacggtacattactgtaccgatcattgactcactcaaactatgttaatgtacgaagtgtctcgaagtccagccccagcagaatcgtcatgatcacactcagccttcctgctccgcactatgccctgttcctttacttctgcgagcatatattcctctattcttgctgctttactttccatgttcatttcatgctggtttccattattgtccctaacgatatcaacagatttatatggaataatgtgccttttcaaagaccgtcacatgttttccaatacaccagctgcatgctttgtttctctatacacaaagtaatcaaaatcggcgtgttttcgggttccgccaagatcctgcacacaaagaccgatataagttcccgtaaaccggatatactctggagattcatcggacagatgtgtgatatctacccactcacctgctgtattccaggatgaatcagtatttattgcataataaaagcgggcgcgatcttgatccaccactgcctttaaacggagcgtgctcaccgaatctagcggaatatcctccagcagttcgtcgtataccccgtatttggactgaataatccccaggcagagccctttctcttcatgataagttacacgtaagtagagatagtcctgggtatcgtagtacaaaatcaatccggccatttgctgtggatggtccggcgcaaattccagacacgtctcggcttcacactccaaggcctgaagtctccgtgcgatcatgctttgcctgtgagttgaactcattgactccatgccgtgcaagcgtaagtaaccaggacgttccgtcaagctgagccaagttgaatcgggtggaatgcgaagtgtattccaatcatgccgaagctcaaagtgatcaaagtcatccatttcagcaatcggctcaaacggatgggactggatcatcggtgcaggcacctgaacctccggatatcggtcaccgctcgcaagtctcagccagccgtcctcactccacgtacatggctgaagtgcggtctcacgtccaagaatgcaatatttgtgctgaacgggtcgtccgatcagatgagccatgtaccattcgccggtatgcgtttcgaccagactaccgtggcctgccttttgcagagctaaatccggtctgccgtatgaagtgaggatcggattggcaggatcgacctcataaggaccttgtaacgtacgggaacgtgctgaggtaaccgcatgctcataaccggttccaccttcagccgtaatgagataataatagtccttgtgtttatacaggtggggtgcttcggtcaggcctaattctgttcccttaaatatgttcatggccggtccgatcagcttatgttcctggacggaatattcctgaagaacgatgcctgcaaaccgattttcgcccttacggtgatcccatatcatattgaccagccattttcggccgtcttcatcatgaaacagggaaggatcaaaaccgctgctgttcagatacaccggatcggaccaagggccctcgatatccgttgctgtcacaaggtaattgtgggtatctttaaaagcgcctacccggcttttgacatcggtgtatatcaggtaaaacacaccgttgtcgtaactaagacagggtgcccatacgcctccggaattaatgtttccctccatgttcaactgcgttacacgagtcagcggagaagcgatgggccgccaatgaaccagatcccgggaatggtgaatccgtacaccagggaaccattcaaaggtggaagtggcgatataataatcctcccctgctcggcagatggacggatcgggatggaaaccaggaaggatgggattggtgatcattttcttgatcttattcatggaagaaacctccggtatgaaagtgatgatctgtacaacaacagatacaagaaaggtagatatcagtaccagcccagcgcttttttgccggcttccagggcggttacgatccgctcgacatcatatacattccctctccaagtcccaccgctgaccgattgcaatgcagcccagagctttgtatcatccggcaaagcttcatcaggtctcatatccgggtggaagggcctttgtgccaggatgagagcgccttcttccggtgaaaactccagatcgccttctccgacaaagttaacgctgccctccagcgtgttacgatcaaccgcgatgtcaatcaggtctccgttccgcaacttgccaatcggtccgcctgccagcgcttcggggccaacatgaccaatacatgctccggtggaaacaccggagaaccgggcatccgtaatcagtgaaacgtatttgccaaaaggcaaatgtttaagcgcagatgtaagctggtacgtctcctccattccagttcccgatggacctcgcccgagcagcacaacaacgtcgccagccagaatacctccggtcttaatcgcatggatcgcctcacgttcagtggtaaaaacctttgctctgccacgatgacgatatacgccatgttcatccaatacagcaggatcaatagaggtggatttgatgacagaaccttctggagcaatattcccggttggaaatgttacagtcgatgagattccaagccgctgagcgtgttctacactcatgatgacactgtccggatcgataccgtcctgctcttttaactgcttccgcatgagataacggcgttccgacgattcccaccagtccagtacctgacccaatgaagtacctgtaaccgttggtacagactcatccaacagaccaagctgtctgaggtggagcatgacctccggtacacctcctgcctgaaagacacgtatggtcggataaaagatcggtccatttggcagggcactaaccagcctcggaacatttttgttgacctgtatccagtcctgtaccgtgggtatggttaaaccggctgcatgggcaatcgccggtatgtgaagaagcagattggtcgatccgccaaacgcggcatgaacggtcatcgcattgcgaatggatgcatcggtgacaatgtctgccattctcatcccctgtgactccatgtggatgagtgcacgtgaagattggcgcgccatttcaaaccagatgggctgtccggaaggtgcaagcgcggcatgaggcactgtcatacccagtgcctctgctacaacctgggccgtagccgcggtacctagaaactgacagcctcctcccggtgtagcacaagctcgacatcctaaatccgaagccatttccagagaaagttccccgttgacgtaccgtgcaccgatggtctgaattttaccggcatcctctccatcggtaggcggaagtgtgacgccaccgggaacgattacaccaggcaattgcggcatgccggcaagtgcgagcatcatcgctggaagacctttgtcacaagtggcgacaccaagcacgcctttacgagttggcagcgagcgaatcagtctgcgaaataccatagcggcatcgttccggtacggaagcgagtcaaacatgccggtcgtcccctgtgatctgccgtcacacggatcgctgacatatccggcaaacgggattcctccccggcttgacagttcttctgcggcagccttcatcagcaggccgacctcccagtggccggtatggtaaccgagtgctgccgggctgccgtcttcattgcgtatgccaccttgtgtactcaagatcagaaattgttttccgttcaattccccgggcttccagcccattccaacattctgggacatgccgaacaagtcgccgcttggagcattccgcagcaaatcatccgttaaaggcagacgtccggcaacccctggagcatgtgctatgatatcgaagcagttggacgcggtctctcccataatcgacgtaatctgttcgtacatgatagcctcccacagtttatgacttcacaaagaccgttttgatggccgtgaaaaactcgatagccgcttgcccctgttctctggagtgtgaacttgacatcttcattccgccaaacggagcctgcagctctacgccggctgtttctgcattaattctgaccagtcctgcatccatgtcccggatgaaagacaacatggctccgacgttctgtgtatagatggaagcactcaagccataatcgctatcattagccgcttcgatggcttcctccagggaatctaccgcaatcaaggccagaactgggccaaagatttcttcccgggcgatggacatatgggattcgaccccttcaaatacggtcggctgcacatagaatccctcttctaatcccggaccgtcccctctttttccaccagtgagcagaacggcaccttcatcttggcctttttgaatataactcagcacggtattgagctgtccttcgcttgcacatggacccatccagcttccagaagacatgccgtcacccagccgaatttcctggatttgcgagagcagcttttctttgaaggcatcgtatacttttcgttcaataatgaccttgctggtggccgtacatttttgcccggtcgatttcaacccaccgctgatcgtggcttccacagccaaatccaggtcagcgtcagccgcgataataatcgggtttttcccacccatttcaagttgatacttggccccacgtgccagtgctgcgccgccgacccgtttgcccacttcattggaacctgtgaacgttattccgcccacatccggatgctcagcaagtgcagatccgatcactgagcctctgccgcataccagattaagaacgcctgccggaatgcccgcctcttcaaaacactccattactttagccgcagtgaccgcagtttcctgagcaggcttcaacacaaccgtattgccgtaaatcaaggccggagccgttttccaaatcggaatggctactgggaaattccaaggagcaataatcccaacaacgccaaggggtacgcgagtcgtaaacatcagtgcttcgctgtccgttgatggaatgacatccccagtttttcgcatgccttctccggcgtaataccttaagattgctacaccgcgcagtgtctctcctttggcttctgggagtgttttgcccatttccctggtcatcgcctctgcaacttcatcggcccggcgttccagcacattggctgcttgaaatagatagtttccgcgttccgcgcccgataacctccgccaatcttttgctgcttccttcgcggctgcaacagcccggttcagatcctctacgcctgaggtgggtacgtagccaactacctccttccgattcgccgggttgatgctcggttcggtttcaccggatatcgccttcacccattctccgttaatgtaattgctgtatgtctgctctacctgaaatgtggtcattgcattcatcctcctcgtacattagtttgaaatgactggattaataagtgtcccgatatcgctaatggatatttcaatgcggtcccctggtgcaagtgtaaaatcattagggggcacaatgcttgtgcctgttaataacaccgtaccgtcaaagagatcgttatctctggccagaaaagagaccagctcatcgagttttcggtttaactcacttgtgcttgcctcgcttttgacaactatttcaccttcgcgatatatttcgcagacgatgctgaacgcatatggattctgcaccgtttccgctagacgaatggctggccctatcgagcaggaattgcgccacatttttgcttgcggtagatacagcggattctccccttcaatatcgcggcagctcatgtcattgccaacgatgtatcccacaatgctgccatccccggcaagcaccaaccccagctccggctccgggatctgccaattggaatcgctgcgaagtgtgacagcctcattgggcccgacggtgcgggctgctgtagatttaaaaaagatctccggtctttcggcatcgtaaactttatcgtaaaaggtctttgcatctagcttgccttccgttgcttcataatttcgcgcttcccggctgcgctgataagtcacacccgccgcccatacttccggagcttccaatggagtgattagatgtaaggaagtccaatcgtcagttaacttgtttaatggtttaaaagcgctttcaacaagttgaactggagaaatcccctgctttcttgcttgatagatcaaagtcataaaatctgcttgtggcaaacgatacgcttgttcatcatccgtaacggctgccagccacttctgttgtccgtccagaaatcgaataattctcattcaagcttgcctccatttttccccatcgggttgataatactaccatagcacccgctatggttcatgacgatgttctaatcactccgacgatttacccttttcacgcattttttttctgttaagatgaggttagatccgttgaaatgaaaataatttacgaggacactccgatgacaggatgttggaatatagaatagtacaagggggttggtttgctgtgaccaagctttcggatgctgtgtatttaggtcgtctacccgatgttcgcatgtcttttcaattattggggttgcatgcaagaaaagtagattccagctggacttatccgtctcatgaacattcaatgtatgaagtgcactggatgatggacgggcagatgaacatggttgtcaacgggcagtcttatcgtcagtcggttggtgaccttctgttcatccggcctggtatgacccactcttgcaccggagccggaccggaggggttcacttatttttccgtgcatttcagcatacacgatacatccttttgcagagaacttaaccgttgcaaagacatctattatccggcaaattcaaatttggctctggggctttccccttccctgtctaccttgtatggtctggccacagagcatttgtctagctcgctaacttcctccaaacaaatgaaggtacatgccgccgtgtttgaactgctcggttccctggtcggtcagttatctcagcaagcttccgttacgttgtcgagaaaagaaaccattgcccatcagattgctgagcacattgaggattcggtaagatatatccatcttcacggggaaattcaggagagcgatcgaacctggattcaggacattgccaagtcgctgagcattagcccgtcacaggttaatcgtatttttcggcaggtatacggcatcgctccgcgcaagtttctatccgaaacccttctgaacgaagcgcagcggctgttaaagcaaaccgacctgaacatagatcatattgcgatgatgctggggtataagaccaatgcgcattttagccgccaattcaagcggtggactggcatcgcgccaagcgaatatcgtagccattcgcagcaggcaggagaagccaacgttgtggatgactaaaagtttaatcatacccccccaaaattgtctgagccgcataggctgatcggtcaacaaaacagctactggatgaccagcagctgctttgttttgtctggattgctcagatcatgtgtttgaggattacgctaaaataaatgatgcaaggcttgcacttccagaacctttgtacgtaaaatacaaagcttgtataccatccggaatggtcatctcgactgaatagggtttccaatgattggtgaaatgtaccgggattgtacccaggacaggaccgttccatgcggttttgacctcaaataccccgtgacaatatccccgtaccttgatcgagacctggcgaattcctcggcaatcaaagtatttaaaacctgccgttgcggattcaaccatattagcgatatatccgacttcttcatcaccgtctctaccatcttgggtgatctttggaaagcggctgtccagccaggctcctgccccgaaacctccagtgtacttctgatcatctttggtcaaaagattacatgcaagatatgcggggtactcgccttttccttcaagcggtctcccacttggaccagaggaggtcatttccacctgagaaatgctgccgtcctcttcaaaagatatcttctcaatacagccctgccggttgaatgcgtccccattggtatgacggtgatagaagacataccagtctccgttgatctccacaatgctgccatggttattgcctccataatacatgggtttgtcagtaggtttgtaggaatcgatatggagatcacagttgcttacgatgacgccctgatatgtaaatcctttatttggaaatcgactggtggcataacataattcatgcataacgatggaggaatacaccagatagtaggtatcacctctcttccggatggaaggcgcctcaaaaaattcatggccctcataaccgctgccctcactgtaaggctcgctcggtgctacgaatatgggttcttccacaatcgtcagcatatccggacctagcatcgtggccatcgcgccatgtcttgattggtctccggccgcacagaagccggtatacagataagtgtgctgtccttcagtcatcacgccgggatcgaactggggctcgtccccttctctttcgcccagacgagtgccgtcgtcatattgtacataaccgtagaattcatatttaccggcaggtgcatcacatacagccaccgaaacaacgggtaccttatccagcacataatacagataataccgcccatcgggacccagcgtaacatctggtgcatacaagcacatatggccattcggattcagcgggtcatctgtttttcggtagatcaccccttcatttctccaattcccaaggtcattcacgggtgcagaccagcatacataatcgttcagacagaaggcatgtccgttaaaacggtcatgtgaaccatacacatacactctttcattgaatacataaggctcactatcaggtacgtactcccaggatggaagatatgggttgaacccctgcttgttcattacagctacactcctcatataattgtaatagtacattcgttctatgaaataaagataactctcgtataatagaaaatagcttaagtagagtatgggttattcttttttacaacctaaagataaaggggaagaaccatgacatctattttttacgttgaatgtgacgcggtacatcagaatcattttgtttttgatatccctgaaggacatgatgcctggttattagtcattacacagacccctgcccagttttgggttgatggacaacttaaggaatacccggctcattgtgctgtacttttcaaaccgtatcaaaaaatatattatcgggcttgttcagagcgctatataaatgattggattcgttttgaaagtgatgaaccgtttgtaaccgatacctcccttccgccaggcacacctttcccgctggatgatccggaatactgtcataagctgttccaattgcttgttgcagagcattcttttcagaacgattaccaggaatcatccatcaattgcctgctgcgaaccttgttcaataaattgcttgagtcttgtgtccaagaggatattagtcctcagcactatcctctgttgaagcttcgaacggcaattcataacgatcccagccatccttggaccatatcggaaatggcgaagatcataaacgtcagcccggggtacctgcagttgatgtacaagaaatcgtttggcctctcgtgtatggaggatgttattcatagcagaatacgtttggccaaagaatatctcagacatcatttgtatacggttgcagagattgccgatcgatgcggttaccgtaatgtcgagcatttttgcaggcagttcaaacaaatgaccggttcctcgcctaaacagtttcataaacgacatgaaggtgtcccggctgacttaacagagttgggatataaatctcacttttaaggtggatgtatttagatcaatggaaaaattccaactctgtccaatgggcgtttacacatactttagccatttaatcggtataaacgtcatcgaggttgttagcgttctctgccgtcattttaagttaaggttttagactgtatgatgcaatgacatattctcaagcatgattgatcaattatcatattgtgataccttataataacatacattggaaagaccaaatccaagagtcttcctgattggaatcctggagcttaaccccatttcgaactttttggattatttatctatacttatatctccaaacaaaagaagtcactaatttagtgacttcttctgacataaagtttcctattataaattttctttaacttaaaaggttctgattcatcaatccttaattaagggttctattgggatgaagagcacgagccattgcatccatataacccttaacagtacgttgactcacttctgtttctggagcaagaatttcgaaaaggtggaagcaacctggatagaggtgaaattctacatccacacctgcttgtgctaatcgtgccacatactccatcgtctcgtctcggaatagatcgagctgacctacacaagtataggctggtggcaatccggccaagctctctgctctcgaaggtattgcataagaagaacttccactgatatcgttctcctcaccaaggtacatattccaagcagccacgttgtccgttcggttccagattgaaccctcttctgtaatctcatgactagatggcgtgatgttacgattatctaacatcggatacaatggcatttggaagataatagacggacctcctttatcacgtgccatcagcgcgagtgctgctgtcagtcctccgccaccgctagcaccggcaatcgcaacccgattcacatcaatgccaagcattgctgcttcctccgtcatccataccaatccagcataacaatcttcaatccccgcaggataagggtgctcaggagcgagcctataatcgactgatacgacaatacattctgctgtctgaacaaaacgttcgcacaatttgtcgtccatatctggatgtcctaacacgtacccacccccatgaatccataacatggctggtagtaaatcattcgttcgttcggctggctcataaattttgaccagcatctcacctccatccctcggaattttccggctagttgtgtttacatgctctgattttttcaccgatgcagccgatactaagtttctgctccactctaaatttttctccaattcaaaccctggaaattgtgaatatacctctcttaattctggtaatatacgtgtctcaatactcatgataattcctccaaatataataatgaattcgttcatttatgttttttagttaatccttatctcatttcagcttcccacttggaaatttcctctcgtactcgcggtgcaacctctttaccgagcagttctatagcctgcattaccaactcatgtggcatcgtgcttaagggaacatacatcatgaaacgtgtaattcctacatgcttgcgcagatgaataattttttgagcaactgtttccggatcccctacatacaacgcaccatcagagctgcgggcagcgtcatagctggaacgatcgtaatatgcccacccccgctctttgccgagtttattcatgccgtactgagtggacgggaaaaagagttctgcggccttttctgtatcttctgcaacaaatccgatagaatgtgaacctacccgaagctgtgatacatcatgaccagcatgagttgccgcctttttatacagttctacaagtggcgcaaatttcgttggattaccaccgataattgccagaactagtggcagacctagaattccagcacgtatggcagactcctgagtacctccgctaccaatccatacaggtatagaattctgaacaggacgcgggtatacccccagattatgtatcgctggtcgatggcctccattccatgttactttctcggattcccgtaatttaagaagcaattcaatgttttcattaaataaatcctcgtagtcatgcaggttataaccaaacagtggaaaggactcaatgaaggaacctcgacccgctataatctcggcacgtccattggagagaccgtcaagcgtggcaaaatcctgaaacacacggacaggatctgctgaagataggaccgtcacagcacttgtcaatcgaatccgttttgtgaggggcgcggcagcggacaacaccattgctggtgaagatgctgcataatcatcacgatgatgctcacctatgccaaacacatcaagtcctacctgatctgcaaggacgatttcttccacgacttctcgcaatcgctgtgcgtgactcatcacaactccggtcttagtatcaggctttgtttctacgaatgaagtaacacctatttccataattaatctctccttagattttctttccttaagaggaatgctcaagacaacggattaaagccgtccaatccaactcaccataaccatgggtaattccttcagagaggtgttgatgaataagctgacctaaaggtagtggagcttgaactgacttggctgcctcgatagctaatgcaacatcctttaacccgagcttcatattaaaaccggctggttcaaaccgctgttcggtcatgatcgcgccatagttctgatataccggagattgaaaaagagcattcacaacatcgatatatcgggacggcttaataccgtgcttttcaaccatgagctgcgcttccgacaaagcttccagcattgaagcaattagaaagttaacgcctattttgacaatgttaccttcttcgccatgatccccaatctcaaatatctcttgacttagtactgttaacatgggaagtactcgttgtcttgcatgttccggaccagctaaaataatgcgcaatgtagctgctttagcggcatccgggcgccccattacggtggcagacacaaagtgctggtgtctctccgcatgcaaagcggataattttcgagccagatctacgctgatcgtactggcagatacgtgaattccattttcagataatccgttcagaactccatgtggtccctcgacaatctctctcaaagcagcatcatcagataacatggtaattacaagattgctttctttcgctgcctctagaggtgtttggacataccgtgctccctgttttattaatggttcagctttttcaggggtccgattaaagatgactaattcataccccgcgttcaacaggttttgtgccattggaagccccatattaccaagtccaataaacgataccttcattggttgcatctccttattgttgatggaatgtttcgataacggaatgaatgttccagaatgattaaaaaaattatggtcttgcagatacttttcaaatggcaccttcaaaatatgaggaatataataacggaacaatcattccaatattgctaaaaaaaattatatccctgcaattacaaagctaatcatctcttttgcacgttctggattttgacctgttttggccataatatttatgctttgatgtaaattcagcaataaataagacaatgttttgatatctgttgttttatctatctctcccgattgttggcccttatccaaaagctcgcaaaatgcttgttccaaatccgaaaaactagtctgtatcaagacatttatctgttcatctggtgactccaatgttgttgctgtatttgttacaaaacatccgcccggtaggctggtatcgtatgctgaagcaatatgatactcaaaaaattgaagaattccttctctaacgttggacgcttgttcaagaatggtctgtttattggaactcccttttttataatgctccagggcatctctatacaaggtttgcttgtcggaaaaagtatcataaaggctggatcggctaatgcccatcacttccagtaaatccggtatactagcagcctcgtatccttttttccaaaacaacagcatcgcttcgtgtaacgcttgatttttgtcaaattctttagtcctggcgataagtaacacctcccgtttcagaaatataacatatctgaactgatcagtccagaaaagaatcttgccggttgttaatcgttattaaaaatttatccattgaataatatatgagctatattttacatctaactccaaaaatattaactttgttatacaccaaaaagatctcttgagcagtgaatgctgaagagatctttttattttacttataagcaagaattacccatcactgaaattacactggatctggagttccagttctgcttctcgatttcttaaatagcagtatggcaagaagtaaagcaattcctacagctccaaaccccaaccaatttaagtacaggacagatgtacgactgatcacaatcccacctaatccagatcccagtgcaaaaccaaactggataaatgacgtatttacgctaagggcaatgtcgggattacgaggtgccagtgtaaccagatatagttgctgggccggagatatgctccacgttgctaacataaaaatcattaaaaccaagattaacatcataagattaactccagctagagcaaacaaaagcagagttacgccttgtaacagaaggcctagacaaattgtaaactttgatccctttgcgtctgccaattgtccgcccacttttgatccgacaaagctgcaaattcccgcgagaaacagaacaccgcttatctcggtcatagtaagagtggatgtggcttgcaagaaaggcgtaatatacgtgaacagtgtcgaatagccgccgatatacaataatgtaataagcaaggcagtcagaatgagtggattttttaaaatggagagctgcattctgagggtgatcttttcttcctctttgattgccggaacctttttgtagataataagtaatggaagaacacttaacaatccaatgaatataaatagaactctccatccaaacatttcactaaaaaatgtgcccaatgggacaccgagcactagcgaactgcttagccccatcaaaatgatgccgatggcattgcctcttttttctttttcaaccagtcgtgtcgatacggccatcgctactacggtagccactcctccgctagcaccttgaataattcgcacccatagtaaagtttcgtaagaaaggtcaacaagcataagtccgttgctggcaataaacacactgagggcagacaacagtaacttcttgcgatccatatttattgtaattgcaatgagaatcggagcgataatggccgctgccagagcaaatacagtcaccagtaaacccacttcggaagtagatacgctcaagtctgaggcgatcatttctataactcctgtaataatgtattcaagggttccgatcagaaaaacagccaatgccaagatatatataatccatttatttttcactttaatccactccgtcttcttcagttatctatttagtattggaatttgtatttctataaactgtacatcttgttcttgagataagggtaaatataattccctaccagctccgttctccttgatctgatagttattcttctcaatccatgtagctagatgaacacaggctttacaggcaaaggtggcattggaacgataagctatggtggccatcatgggctcggcaggaagagtccgcagttgaaatgggtcgggaggtgagcgcagatcacaggttaagaagtaacctatttcaaactcgaactcttcctcttgtcctgcgatttctttccacaaaacaacctgaggtccgtcgatcagttggcgcatttcttttgttaatgactggtcaaactgacgaaataaactcgggatatcctcttccctcccacaacctgtctgaaaaagaaactgccgagcaccttcctctttgattcggatttcttgcccagtttcgacgtgcccctcttcctctataagctgcatgcgttcctcaatccggacgagtttggcttgttccgtatcgataacctgctgaatttcgcttctttttagcttaaacatgccttgaatattctccaatgtaatatgctcctgtaacagctgtgtgatttgtggcaacgtaaaccccaattctttataaatgaagattcggttaagctcgagaagctgatctgcggaatagtaacggtaacccgtatcgtgatctacctttctcggcttaagtatgccaatctggtcataataacgcagtgtttttaatgagaccctacttagcctggaaaacgcactgattttgaacaacatatcatctccaatcttttaacctaatgcgagtatatagtttcccgtacaggggaaagtcaagggtgtatatgcttctcatttgcctagctaaaatcaaccaccgtccttgtcatcactctatgttgctgttaaatgtaagtcaaagaaccgtttttgaatgaaacgttcattatttttgaacaaaaaaatgccactcatcgtggcattctctcggtacgcattcaattatcctgctcagcattactaatttttttaaataaacagattatgattggcttgtgatgcttgtccaagatagtaacctacgccaccaattttgacttggtctattaattcttcacgctgaattcccattaaatccatagacatttgacaggcaacgatctctactccttgtgcaattgcgctctctatcaattcttccaacgaaggcacatgatgttttttcatcaaaccacggatcatcttcgggcctgctccgagcatattcattttggacatgccaagcctctggctcccgcgaggtaacatcatatcaaacatacggccgatcatagttttggataacttctgaggctgcggcttacgaataatactcaatccccaaaatgtgaaaaatagggttactttccgtccactcgctgctgccccatttgcaataatgagtgaggcgatcgctttatccagatcaccactgaaaacaaccatcgtgctggcaggatcgctgattggggcattggatacgggttgtgctgtatttttggcaatgacagactcaattgtaccgcctttcagtctttccaactgcaagattgtggaacccgacattgtggcccatgctttaacatcttcatagaagcctggatcggaagctttcacgcgaagggtttccccgttcgagagttgatccattttttgcttcacttgtattagcggaccgggacaacttaatccgcatacgttcaagtcatgatcaatacgttgcggctgtgttgagtcagtgggaatagactccttttccttagcgtctatcacaggatcatgatggtctttttttgcagtagtaaatggagcaggattaaactgggcttgacggtatgttttataaccaccacttaagttttttacgctaaaaccatgctgacgcaaaatttgcgaagcagtgtaaccacgtaagccgacttgacagtatagccagatttctttggatgggtctaattcatctaaacgttgacgaagctcatcaactggaatagagagtgaatccggaatatgaccattttgatgctcaatttcactgcgtacatccagaagtatcgactgccccggctgacgatcagccagttgattataggtgaacgtctgaacacgtccggtaatcatattctctgctgcatatccagccatattcacgggatctttggcagacgaataaggaggcgcgtaactcagttcaagctctgttaaatcccggacatgtcctccaaaatgaatggctacagcaatatcatcaattcgtttatccactccatcataaccgactgcttgtgcgcctaaaattttgccttccggagtaaacagcagtttaagagtaattgcacttgaacccggataatacgatgcatgagaagcagggtgtacgatcacggtttgatattccacgccgagacgctgtagtgttttctcattactgcctgtcgtggctgcggtcattccaaatactttgataatggacgtaccttgtgttcctttgtaggtagattgaagccctgcgatacggtcggcaacaatacgaccttgtttgttggcaggtccggcaagtggtatcgttgccttcgtaccatgaatggtttccgttacttcgatggcatccccaacagcatagatatgtggcacactactttccaaggcttcatttacgataatatgtccacgtgcacccagcgaaacgccgctatctttcaaaaaataggtgtccggcgttacgcctatcgcaagaataaccatgtcagctgtcaacacatgaccatcggcaagttcaacccctatgccctgctctagggaatgaaatccctgaacacgtttggaaaacagcaggtttacaccatgattctccatttcctgtgctaatgcggctgctaactcggtatcatagggtgtgagtacttgtgcgttcccctcaataagcgttacatccagaccagcttcctttagattctcagccatttctacgccgataaatccaccgcctatgacgatcgaatacttgttgttataagaacttatctgttctttgatccgatcaatatcaggaatacttcgtacggtataaattagtggattgtccttacccggcagatcgggaatcatcggttttgcacctggtgacaatatcaactcgtcataactttcttcatatgcaccgcgctcctgggattgtatcttaaccactcgcttctgcgaatcaatagctacgacctcacttcttgtacgcacatcaacacaaaagcgatctgccatcccttttggcgtttgcaccagcagacggtctcgatcatcgatggagccacctatataataaggcaaaccacaattggcaaatgagatataaggtcctttctcaaagataataatttcggcatgttcatccagacggcgaagacgtgcagctgcagatgcacctccagctacaccgccaacaatgagtacttttttgctcatgattcacaatcatccttttcaaataaagttttgataatctgttcaacccgttgatcggcaagcacatagttcacttcaagaccattccgctccgtagcaacaatgcctgcactacgaagtttctggaggtgttgtgagactgttgattggggaagatccagacattcctgcatataagaaacattacatttttttttcatcatcagtccgcgcacaatgcataaacgaatggggtgagataaagctttcagcagattagcaggttcatcgaactgtttaatgttattgctgtcaaaagcgggagtgttcaaaagtattcctcctaaatcgttatatcgtaataatacgatttattgattcgcctgtcaaatgtattctggaattaatgcgtttaataagtcgcatacccgctcaaccctacggctttgcttgttccaggtggatgataaaaatgcctgccaaaaccgctaaaagcgacatttgacaggcattcatgctgtatcaagccttcattaaatagcgattcaattgaattgcttattttagagtataacaggctgaatcagtccgtccttaccaaaaagaagcgggtccatacatatttcgcggtgatacccctttccagaggagaatctggacagtggtgttacaaaacggtgataggcaatccgtagttgaccggtttcattttcattaaagatacagtgatgacctgttcccagcatgcccttctcgacatttttgctcaggattgggtatcgataggtaattggaccatataactgctctgccgtaccgtaattcacatgatagtcttcactgcctgtgtcatcacaggaccacgtaaaatggtatagtccaccctgcttcagcacggttacagcctcacgaaaatcatgcaagcccgccagattgctcattgtgtcctcaacgacacttatcatgtcttcaccaagctccacaatggcaccatgtccattgccaaatagcagatacggtcttccatcatcttcgacatagatggagggatcaatagcttggcccatagcaatgcccagacgtttcaactgctccattgtgatcaaaggttgcgactcggccaggaatggtccaatcggtgtatccgctacagcaacgccaatggcactgtcgccgttcagcattttgccacagaaataaaaatagaacttttcgttacggctggcaattgccggtgcccaggcattaccggttgcccaggtgacatcctctgttcccagatcaaggataacaccttcgtcttgccaatgcttcaggtctgaagaagaaaacactttgaactgtgtccccgaccacccctcgaagccatctgttgttggatacatatagtagcgatccccaaactgtgcgacatcaggatcggcatattgtccgggaagcacctgatgaccatccccaaaagccgcgagaagccggctgcactcctcagctgtgattggcaggacacttccatgccgcttttgagtcgttcccatatcgaattcaccatcagggacgattcggaattctccacttcccagatctgtagtcagcagaggaagataacccttgccttcagcaaatcgatcaacaatcagacaccattcctcccggtcattgaatttaaagatttgaggtccctccacacctgccatagcctccagtaccggagcttgaagtgtaacaaatgcccctttgtcgagagagtctcctttttctacccgtatgtttttggttgtttcatccttggagtatcgataataagagccatccgcaggaagaatcgttgtatcaataatatgattatcccgctcaatgtatttttccgatgcagaaaacgtacgaaagtcttttgtacgagcgctgtatattttttgttttcgttcttgctcctgaggttcctgcgtcgcagaagcccagaatacaagaaactcatctgccatttcatcatacacagcttctggtgcccagacacatccagcgccctcaacacctagtgtaacgttccatggggatgaccagttcacgagattgctggattcccatataattacgtcacggctcccggtattaacggcatgactccatcctttgccgcttgcgatgcggagatccgtagcaatcagataaaatttattatccttgactgaacgaaccagaaacgggtcccgtacccccttttctccaaggtctgaaaacagcacaggtgagccgccattaaggtccttccagtgaagtccatcctcgctataggagaaataaacctgctctccgtctggttgttcgccaataaaatgtacaaagagatacccatcataagttggagttgttttggtcaatggtaaagagcctcctgaaaatgaaattgattttatattaacagtaatataaaaatgaaagcgttctacttatgttgtatcatacttcaaaaacagcgggatgagtatatttttgtaatctcgtatgtagaagatcatgtgaatctttcgccgaaacatattgccctgattggaatatttgacttactcctcatgcaaagaaattaaagttatcgccgtatttgtttattttacctctggtatacaaagttcttggtgttcatttacatatagatgctaatcttcttaatgatgaacaaatgaatatagattcatgcattcatttttgttgttgagatattacgaggaggaatcattgtgaaattatccaaaagagtattaccagcggtagcgctgactctggctgtatcggcttctactctcttgtctgcaggacaagcaagtgcggttcaagctgtaagtgtggagaaaaaacaaatcaataacatcatcttcctcattggagatggcatggggacctcttatacttcagcctaccgttatatgaaagatgatccttcgacgaagggcatggacaaaaccgtatttgacccttatctggttggagcacaaatgacctatccggatgatgataaacaaaatgtaacggattccgcttccgcagcaacggccatgtcggcgggtgtgaaaacatacaatgcggccattgcggttgaccctgagcagaaggaagtcaaaaccgtacttgagcaggccaaagaaaacggcaagtccaccggactcgtggctacgtcggagatcactcatgccacaccagctgcatttggttcccatgatatcagtcgaaaaaatatggatgcaattgcggacgattattatgatgagttgattaatggcaagcataaggtggatgtacttctgggtggagggaaatccaattttgtacgcgagggtcgtgacctgacgaaggagttccagaaggccggattcagctatgtgacggatcgttcctctctcctcgctgataagaatcaacaagttcttggactgtttgcggacggaggtctggacaagttgattgatcgtactgctgcaactccatcattggctgagatgaccaatacagcgattgatcgcctcagttcgaacgacaaaggattctttctaatggtcgaaggcagccagatcgactgggcaggacatgataatgatatcgttggcgcgatgagtgaaatggatgatttcgcagcagcatttcaggcagctattgattttgccaaaaaagacggtgaaacacttgtcgtagctactgccgaccactccacgggcggacttacgcttggaaaagacggagaatacaacttcttcgtagacccaatcaaagctgcactgcgcacacctgacttcatggcagcacaaattgcaaaaggtgcttcggttgaagaaacactgaaaagttatctcaaactggagttgaaacctgaagagattcaatcggtgaacgaagcagccaaaagtgcggatgtaacaaagattgataatgctattgaagcgattattgataaccgttcatataccggctggacaacaggtggacatacaggtgaagatgttccggtctatgcctacggtccggcaagtcatcgcttcgccggtttgatcgacaacacagataatgccaagatcatatttgatattctcagcaagcaccagtaaaaaaaatccctaataaatttcgggtaaaactttgaaaaagcttagcccttgtctccagttgttgccgttggagacaagggcttttaattgatcattcgtgtacttgacgaagtgttatattatcttcccttgacttttaatacattctttataccagtagaaagaatcttttttaactcgctttaatgaaccctttccatcattgtctttatcgacatagattaagccatatctctttttcatctctcctgttccggcactgacaaggtctatgcaaccccaaggagtgtaacctatcacttcaactccgtcttccagaatggcttttttcatctcactcacatgctgtctaaggtaatcaatccgatatggatcatgcactgacccatcctcttcgagcgtatccactgcgcctaaaccattctctacaataaatagcgggatctgatacttatcatacagccagtttaatgtaatccggagacctaccggatcaatctgccatccccattcactggcatgcaagagcggatttttataaccgcttatttcattcccctcactcttgtcctgatcggttggattagccataatcacagagctggagtaataactgaatccgatataatctacggttccttctctcagaatcaattcatcctcaggagcagtttcaatttccaattgatgctgcttcaggaacccgtaatatgagcgtggatatttgcctctgacatgtacatcgagaaagaagtaagcttgttgaagttttttgacatgggcaagcacatcatcagggtcgcaggtagctgcgtatgacgttggatgaaggaacataccgccgatcataaagtccgggttgatctctttaccgagtttgaccgccttggcactggctatcagcatataatgcgcagcctggtacatggtctgaagtttgttttccccatcgttccactgaatgcctcccggtttccatggcttgcgcacaatcatattgatttcgttaaacgtcatccagtatttaaccttagtccgatatctggtgtagactgcttcgcagaagtttaagtaaaaatcaatcaatttacgattgcgccatcccccatattccttcactagatgatatggcatttcgaagtgagatatggtgactactggctgaatcccgtatgccaaacaggtgtcaaacaagtcatcatagaattgcagaccttcctcattcggttccgtctcatctccgtttggaaatatccgtgtccacgcaatgctggttcgaaagcatttgaatcccatctcatgaaacaactgaatatcttccttgtatcttgtataaaaatcactagcctgatgactagggtaatatacattctcctcaattccctgtgtaattcttcgctccaagccatgtgttgctgctgtcatgacatctgcaacactgactcctttgccgcgctcattccatccaccttctaactggttggccgctgcagcgcctccccaaagaaagtctttagataatttactcatattaaccacctctaagcgtgaatgcgtaacagtgcttcgttttggacaacccgatcctcagcaatctgctcaacactctgatattcaaaagtatttgatataatgatgggcacgaccgtatcaaatcctgctgcccgaatagcttcatgatcatattcgatcagcagatctccttgcttaatcacctgatcctgctgcacataagctgtgaaatgctttcctttcaacttgacggtgttaatccctacgtgaacaagcatctccactccttcattcgacatcagtccaatggcatgtttggttgggaacagcgatacaactttaccgtcaaatggcgcgtatactttgccatcgattgattcaactgcagcaccgctccccagagcaaagatgggatcgtcgatttcagttatatttttaactatcccgttaatcggagagccaatgattagtgttccggttggtcgagtcaaagcatgggattctgaggtcgacgtaatcacattagcggcagcagaaccatctgttccattgccaacacttgcagtaactggagctggaatctcttcttcaattccccagatcaagacggcaaccagtgcaagcgtaatgctgattgctaccccgataatgatgtgtatataactgtcagcgatataggttggcaaggccaggatacctggcagaatcagagccgttgctcctccaccccagaaattgatgtaagctgctccgatacctcctgcaagcatcgcacagataaatgggcgcttgtacttaaggttgaatccgaagatagccggttcggtaataccaaacatcgccgttacaccactggatagagcactggatttgctcgctttatgtttcaataagaggaatacaccaatacatgccccggcttgagccagatttccagtcaagttcgcaggtgaaattaccgagtatccatattcagcaatcagctggctgttaattggagtaatcgcgtaatgcatgccaaatataattagaaggggtctgaatgttccaaataaaaatgcaccaatgacgccattcaccgtatacaaatacgttacaatttgagcaactccactgccgaagtaggttcctaaaggtccgaaaacaattaatccaagtggaaccataatgaacaacacaatcatcggcacaaacaaaattttaaacatatcgggtattcgcttattaacaaatcggtagacgtagctcatcacccaaaccgaaataataatcggaatgatcgttgatttatagttcacgagcaataatggaaggccgaaaaagcttaaactggtaacacccgtctctgccacttttgctgcaccttccataatggtgggatacatgtaagccccggcaagggccacagccagatattcgttggttttgaacttcttggccgcgctgactgcaaggaagaaggggaaaaaatagaaaataagatcgctaatcagactaaaggtttggtacgcaccacttgttgtctcaagaagattcattgtcgtcaggattgcaagcacagacttcaccataccgcacccaatcaacactggaatgactggcccgaatatacctgccaccgtttccacgactcgggaaatcacattctttttttgttgtattgctttcacttcaatgtcctgattttccaagtcaagcttttcacttactgcgtcaaaaacgcttttcacttttgcgccaatgatgatctgtaactgaccgctgttaaactgggctcgcaggacaccttccagtcgatcaagcgctttcaagttaacctgagactcatcttttacgttgaatctcaatctggttgcacaatgcgtggcatacgtaatattatcctgtccaatgttagcgataatctccttagccaattcctctgttttcatatgattcccccgccctcttagctgtctttacttgcctccggcaaagttgtataacatcttttcacgtaggcctgatgtatctttgccgaagatttctgcaattttgtatgcaaatggataaggtgttgcaggcccttggcttgtaacgagattctggtcagctacgacgacttcatccttgaagatgccgccaatcaatttctcagcgtaccctacataacctgttacctgtttgccctcaatgacctttgcatcggacagtaccaccgtaccggaacacattgcgccaatgtacttattgttctgattgaagtactgcaccatgtcaatcacatccggattttccttcaggttttgtccacctgggcggcctcccggcagaacgatcatgtcatactgctttacttcttcgccaaaaggtttgtctgcttctacaaagatgccgtgcatgcccttaaccagcttatcgccaaaataaaacgtgtcacaggttaatccagctcttctcaaaatatcaacaatcgtcagcgtttcgccctcttcgtaaccttccgccatcaatactgctactttattcgtcatttcagttccctcctattcagcatcaaatgcattgaaatataccatacgatttttgacagccatactgtctccgcctaaggcatccactaatgcaaaagcgaaagcataagacgtcgcggggccgcggcttgtaatcagatttccatctttaacaacaatatcttctttaaaagtaccgctggtttcaattttctgatcataacctacataagctgtgaaatttttgttctccaacacacctgctttggctagtgcaagaggtgctgcacacatggctgctacatatttgccggactgattcatttcctgaataagttgaattacgcgttcatcatcacgaagattagcggccccaggcattcctccaggaagtacgatcatatcgtaagttttaacatcttcactgatgagcgcatcagccttgaccacgatgtcatgactaccacgaaccatttcacccgctgtactaatcatgtgacattcgatatgtgctcttctcaaaatatcaacaatcgtcagtgtctcactttcttcaaatccttctgctaatagaactgcaactttactcacgcacataacctcctgttaattatattttggagcagacatttgcatattgctcacgcttacaccgctatggacatcgtgaatacattcataatttatcatagatattcgcaaccccaaagcacatttagattgcttgtatgtaactaatagttgcagtatgatgatctttaaccgtgttgcatctatagtgtttacatcagagtcacacaaaagattacctcaggaggtatgcatgcttaataactataaatattttttggttctgtccgaagagttaaacatttccaatgcagcgaaacgactatatatttcccatcaatcactcagcaaatacctgaaaagcttggaagaaaaacatggtgttgcgttcttcgaaagaaaacctaaaattgcgctgacagcagcggggaaaattatgcaagatacgcttcgtcaaattgagctgctggatcaaaacatggagaatcaacttactgatcttaaagaggataagtcaggcacgattcattttggcgttaccgaaggccgctatcccattatcgtgccgaaattattaaaagagttttatgccctgcatcccaaagtggagcttaaaattcatcgtacaacctcaccgcaaatgcaggagatggtgttaaacaattcactggatctgtttctctcgggtgtagacaatatcgtaacgcaaaatgtaaagtatgaaacgattctgcttgagcagatgtacatggtgatctcggacaatttgctcaagcagtatttccctgatcaatatcccgagtgcatcgaaacatttaaccagggtgcggatttgagtctgtttcaacatgtaccctttgttctgaataagaaaaacttcaattcccgtattttgctcgataaacatctcgctgaacgtaacatatccctgcattgtattaacgaattgacgcaaccggatatccatcacctgttgtgtgctgaggattacgcggccagtttttcattaacgatgtatctttcagggattcatgcattaaatgagtctaatcatacgaattctcaccttcatgtatttccaatcgctgagttttcctatcttcacccgctcgcattgatctatcacaaatctaaaattttcccctcatacgtagaggatttaaaaaaaatagtcaaacgttattgtaccccttcattgcatcaaagcaattgaataatattggcgttcaattacttagtgcatacaaaagttgagttagtgcagttaacttgtgcttgagttcaacatcatgccaactttatatttttgttatgtaaacttcccgtgtatttgcggattgaagtcaaaataacgaggtgaactgttgtgaatcatatgattgtagaacttgccaactacgtaacccgtcttcaatatgaggatctctccgagagggctatcgaagtaggtaaacaggtaatactggactcttacggtaatatggtatttggtcgatactctgaaacaagtgaacgcattttggaatatgcaagattggcagactctattattaaaaatgaagacttggtctcattgattggtgaacaggatgttcgcactagcacagatcatgctgtctttattcataccatgatggcacgttgtgcagacctggatgacggctatcgccacgccatgggccaccctggatctgtgcttgttccgctcctgctaagtatggctcagcttcaccgaaacgatgggaaacagatgatcaccgccattgttgcggcttatgacgtatatgctcggttaggcgaagcgatcaatccatttatgtaccgggaaaaaggatttgatgctaccggggtatgcggtgctgtcgcagcagcagccttggtaagtaaattaacaaatgcagatgccaagcagaccaaggatgcgatggggattgcttctctgttcacaggaggtttgattgaatatcagaatgatggaacttcagggaaaattttatgcagcggctgggcggcattgaccggattaagggccgtgagactggcatcctgtggtttcacgggtcctgatgcagctttggaaggaaaatatggattctttcaggctttcaaaggaacaagcgggcattgtgacacaagtcatgtgctggaaggactgggaactgattttaaagtgacttacatttatttcaaacgtcatgcctgccagcgtggattacacgccactctggatgctatgttggaacttcgcgaagactatagtttaaaaccatccaagatcaagtctgttgatgtgaggacctcttcatttgtatatcgtctgacaaatcctaagcccaagaccgcaatcggagcacaggccagcacacaattcacttcagccgtggctctcaaatacggtcgtatggactcagaggaattaatattcaatagcttcaccgatccagaggttcaggagctggtgcaaaaaattacagtaaccctggatgatgaagtgcagcaatatctggctgatcatccgactcatttttgcgctgcccatgttgttataacaacacatgatggcaatatatatgaacggtggatgcctgtacctctaggcgatatggaaactccgtttggctggaatatgcttgaacagaaattcaatcaatttcttttagaaacaccatttaatggaacaaaacaagaacgatacgagtttattcgtaatctggaacatatgaatcatgtggataagctgctccgtttttaaacgaatttaaactgcattaatgtaagtttactaaatgcgctaaaaaaggtcgcttacccttgttggataagcggcctttttaacgtttggactcacacaagcctatttcgaatttgctaatatgcattatatcccgtggagttggttaacttatacaacaccacttgtattgaagtgagagaaatccgataaatgctgatgcggcttatagtgaaactacagaagtaacaaagctttggaggaaaatggcatgttaggaaacattctgttgggtatggtcattcccattatattgggtgtatggattctgcgtcggaactttacaatccttattctatattatccacttggtgtggctatttcagcatccatcaacaatatcggatttaattacttctggaatattctgccaaatactcataatcaatccttggctgctcttccaatggatcttggagtctatccgatcgctggttgcctgatgatgtatatgatttcagaaaaaggcgccaagccatggttggcgattcttgttgcatcattgtcgctgacattaatcgaatgggttgccaaaatgatggggcatgtcatttattttaatggatggaacataatttggacctttttgtcatacctcctgccatttgttcttgcttatggttacagtaaactattgaggtataccaagtgaagttttactgaagctttccactaataaggcaggacagatgatatgggttaacgctgatgggcatacgtgcatatcttaactcatatttgtcttggagggattcttaatgtatgtggcatatccttatggttacaggtacacttttactccggtatggtcaacatcatcagccgaagcacttgaattaatcaaaacggctgtgcaaggagaacgaaacgatgaggtgttctatgattcactgattcagttgtcacctgatgccaatcaggctgccatcatcacgagcatccgcaatgatgaacgaggacataatcaaatgttccgccaaatgtacaaggatctgacaggtcaggagattacgggcataagcagtgagccggttgagacggtcacctcttatcttgccggactacaaaaggcgtttcagggtgaattggcggccgtggaaaagtatagaaaaatatggtttgctctcccttatggcatatataaagacacggtgtgggggatcatcctggacgaacagaaacatgcggataaatataacaatctgattacctacaatttgccgagatagtcatgtatgggatgaacaacgtgcgtattcttttaaaaatgaacaattgaaagcagtaaaaaaccagtgaatgagtaaagttcactggtttttttgctttgctgagtctcactgatataaacttgctatcaaatgcactcttccaacgtatcaggttccacatgaacgtgaacggtgtatacgtcatgttcctccattaactcgttctccacgtctgtacagatatcgtgtgcttgttgaaggtccagctcagcatcaactgttatgacaacgtctactacaacgttattgccatagttccgcgctctcacgtctttaactgtctctacgctgtcaattccggcaatcgtttttttgtactcctgaatcagttcaacatcaaaaccatccgtcagatgatgtgtggcttccttgaaaatgtcccaagcggtcttgcagatcaggaaacctacaatgacagccgttacagggtccagccatgggaggccgaactgggaacccacgatcccaatgaccgtaccggtgctcacccaggcatcggagatattatctcgagctgcagccatgactgcctgacttttaatacgggaagcaagtctcttgttatagcgatagaccagatacatgacaaccgcgcagaaaatgcctgtgtacgcagcgatgatatccggagattcatgtgtaccctgaaacacagaaccaatggcttgaaacagtacttgtaaacctactgccatcataatgaaagaagcaacaagtgacgcaacggtctctgctctccagtgaccatatgtatgatctgtgtctgctgggcgttgggcaagcttcaaaccgatcagtacagctattgaggccacaatatcggtggcattgtttaatccatccgccttgagtgcttctgatccggccatattgccaacgatcagttttaatacggtcaaacatatgtaggcgataatgctgatgatagctccgcgctcccccagctttagattatcgtatttaagttgatccacatgatatcctcctgcaatctttaattcaagcacgtgtatgatggtaccattgaagatttgtgtgggtctagagaaacgttttgagtgtgacgaaacataatctgaacgcggcaatttttttacaagaatccaaaaaagttggatttggcaaacttaagtgattaatgggtggtaagaggaaggtggccgactgccttcccttgtaaccacactttcgtgcacttagacaaaaagagccaaatggatcgttttgatccactcggctcttagcgttattttacaataatttgtataacatcacttaccgttgttccacttccattcataattcactgctctgattcagaaagtgtcggttcaactggcgcttcattggcaagctgctccgaatcatcggaatgccgttcgaacataactgcgtcaaccctcgtatagatcatatccgcaggaagcgttggcgggtctaccgttgtaggcgtaaccctggttaatcgaacatactcgctaccgtcgcccgtaaagtcgaacgtccccagattaacccaacccgatgagccgaccgttgcatcgatataggtgacctcggtacccgctttatgtttcacttccactttgacattgttatcgtttgctgtcgtatggacgagtttatagatcgagaccgtatatttaccttctggaaactcgcctttccacgttgctgatgagccttgaactgttgaatagcgggatttaaccccaattttgtatcctgctaaattgctttggctccatgacccttctgtcgtgtataaccccgttgtatttgtactatcgacgataaccgttaagtccctgatcgtgatgttcaaaggtggtgtggttaaggtcactccgtcaatcgtgaccgtagcccatacctcaatgtgatccgtgtctccatcaagattaagaagggtcaacaccccactgctattcacttcagccagatccgtacgatcaacgaaatactgcacatcggcctgtgtaagatcaccgaccaaaccgttatccaaataacctgttacgctcagctgtgcggtttgagtcatctgcagctcgttccgatcggacatgatcacagcagactccaattgcggtaccctgtttgggtccacccacatgattgcatcggcaacgactctggacttgttggccttattggttaattccacgtacccgctatcgccttcagcaaaaggataatcccctaggtgcacccaagtaccattcgctgttgtctcatcaactgtcaccgtctcggagccgccgctatgataaacggtaaatgaggcatttgttgcccaattttcactcgcagccgtgatttgcggaatcttataatacacactgtaagtgacactttctggcagctcaggccgccatctcattttgcttgtcgctgtgccggtcgtagatttggcatacacatagttatcataataataatcgttagctgtcgtatcccttatccagacgccttctgtctccgcctctgtattatccacaatgatggttgagctatcctgcccatcgggttggactggagtttccgttacctgatcaggcagataaagtgtccgcttgcgggtttgtttcccctccgattccacgtaatacgtgaaagtttgggataaatcattcactcgtatcgaccattccatcggatagatcgtatctgggatggtcgtgtacgttgccccgccatccaaggaatagtggattgtcgctggtttcgttgttttggcctgtacataagcatcataaaccgtttcgtcaggcttaacgatcagcatgcctttaaccgcatcaattggactgtgggtatcaaagaaataacttgcatccgatgtatctgccgttctgacctgatgcagcggtacatcaatatcgagtccctctacaatgatcgcggtgatgcccttgcctgaaaccgtggcttgaatgattccaccactcattaccgtttgctctggtgtgccattgtcgcggatgatcgttacggtataatcctgtgccgggttgaatccaatgatctgttcattcaattcaatcggagtctgaacttcttcagacgatgcattgcttaatccgatgtagaatttatccccgctctcacccgttatccaattcaattgaggatggttggtcttaataatccccttaggcatccagagccaaacgtccgaattaccataaaattgacctggtttattcccatagaggtgatatttgaaccataaaaaattcgtttcaaatacggaaggaaacgtaatgctcccgtttgatttcaatgattgttcgctgatcaaataatccatcgtttgcccgagttgcccagggatatggtgataatagatggatgtagccccgctggggccttccagaggaaagtccggttcaagttggctaacggcgaaccctttataataataacctggataactggaatatcgtccaataaccgcattatgagcaatatcctgtagcagttcatcccctgtatagagcgacaatctcagcatgaacggagcttcctgagcattcatccgataatagccggttgtacttcctgcttcaaacgtcaatccgctcggtgaaataagccaacgctccgcttgaacacctccggcaatatcttcgggaagcttgagcctaggatattgaaatttaccactttccggccaatgaaacgactcggcgtaattatatgtctccggctgaggaattgtaacgttaccttcaggaactggacgagcaacaaacatggtcgcatagcgtttggcttctttataggcggcatccaagtatttgggatcctgagtttcctcatatagctccaagatctccatccacagcttgctataataataaatgaactcatttttactcacatcgacggatgcaggcgtatcaatatgttgcgcgatataactgtcggctgcatccttcgcagcttgcaaatactgtgcatctcccgtcatccgatacatcatcaggggctgaatgacaggcccccggtctttctgatccgggtcacgtacaaggtactcttcctgagcgagtgcaccaatgcctgccgaagtgcccatcatctgattaacagccgctacgcttgaaacatcaaaaggcagagtagccattttccataaggaaggcacaccgtatactttcttctgcgttggcgaccaaccgataccatttcgcgatacgccatactggacggacggtagtgctctcgtatcgtaaagctggtcatccccagttaaataataagctcccaaaagaaccgcatttgagcttgttcgaacgctgtcctcgttttcgatatcaataaaacccttggcacggctccaccacccgctgggtgatgggacataattaacagagtcgtccccttgcggctcaattttaagaagatcaatcatattaaacatcgcgtcagtaagcgactgatctgacacattttcccggtatgccgaataatcgtactcattgcgaagaatatccacgtaggaatcatatagattgcttttttgagcaattagccccatatgaaattgatacgtgctttctgcggtcatttgcgaataagtccctaattgaggggcatacaggattggctgcacactgccttcgttgttgaccaggctcatgccaagccgttgtttcgtcacacctcccgtcggttcaaattcaaccggaagctctgccgaaggtacaaatacgccatacgttaatggatttcctgaaccatcatttttctcaaccaggctcatcggagcgctcagctctcttaaacttgttgattccgccgtacctaccattttggcatgggacctgaatccatttaacacttcattgatgcccgagactgcctctgttgtgaaggactgatatccaatcacataattgccgtcgcggcgaggcgtaaaggcgaaggaaacatcaggtttatcccctgccatggaccagttcacttcaaaatcgtaatcactgccatgcgtagaatcggttaataccgccgtctggctgtctggaaaatggaccccgtcgaatgtaatccagcgtttgttcatcgtatcgtagtaattggttcggctgcccgcgttcccgtccaataaaacccattgttcctcaagtctttccgattcattattgattggaacccagttccctgtctccgtgtttttgtagaacatgtcacgaacgatggatttaccttcatcccatgctgcctcatagaaggttgccttatagttcgcattttcgatgctgcctttctctgtgtaactgagattcgttaatgtgcggctccgcagcgggggcaacggtggtgcctgttgacggatattcccctcgaacttgactgcatcagcccgcgtaataattgtacccgtagaaggctgcgttcgagtcagcctgacaaattcgctatcatcaccactaaactcatactcccccagatccacccatccaaccgatggacctgacgaaggtcttagatccataaacttaacatccgtaatcccgttatgaacaatctcaattttcacattactgtctgctttatccgcccaatccagcttatagaacgatatcctcgccgtccctgcttccaagcgtggattccaggtgatgcttctacctacagcgtctgtaaatttggaactggaattattgtatcccttcactcccgcgcttgtgctccaatatggagcggagaatccgttattagcgttgccggaatcaaccgtaacgacatgatcaattgtgaggctcccatcatcaatgatgattgtcttatgtggctctttctgcgttatattcccttcgaacttaaccgcatccgcgcgtgtaaggatcgtgtttgtggtgccggtagaacgggtcaattgaacgaattcttcaccaactccagaaaaatagtactctcccaaatcaacccaccctgctggagcgccagatgagggtcttagatccataaagactacatccgttgttccattatgaacaatttcgatttttacattgctatcagccttatccgcccaatccagcttatagaacgatattttcgccgttccttcttctaagcgtggattccatgttatcgttctgcctgctgtactcgtatatttggtgctggaaagatcataccccttcacccctgtgcttgtagtccaatttggagccgcatatccattgttctcgttacccgcatcaggtgtcacaacatcattgatcttgatactcccgtcatcgatgataatcgtctgataaggtaaggtctccgcataagcggtccttattccgatcaggctggaaggaactacgaccgtcaacatgaaaacgatgaagaaaaacagcttccttttgaccatacaattcacagcctctcctcataatgataacgcttccaaaaatgagttaccttttgctctaatgatcgtaaaaaagcacttaaccttccccttctgcctaatcccgctctgtcgtttttatcttagcatgttagattacggtgatatttctttcattttaagaatttcttatacgattttaagtaaaaaaagaaacctacatcctaattgattgctcagtagcagtcagatagaatataggtcttccaagtgttgcaagaggacttatcaattataaaggcggctgcaccaataacaactttccaagctgaatgacggtttgatcataccaagctggatgttgccgaacatgttccatacctcgttcattgccacttgcctcaaacacggccgctttgtcagttttctcgtgatcgatctcgaagagaactgtatgtttcccatttggtagctccggcaagaaaacatattgatttcgattatgatcgttatagggtgtgaatcgatcaataaggaagggttcccctccatccaccgacaccttcaatcggccagaatccggccccccgatatcaaataatccgatgtgtgttccctcaaactccactgtgatcgcctctccaggatcaactgctcgccacagaccggggaacaaccaatcgtactcacgcactaaaggaaaatcatcaggggtcatgtaagaccagcctgcggaaaaatgagtaagacgatccagtggcagcatggttgcatactcccaaggattggacgggaccaaggggtcctgcggcaagtgatgttcgacttttcccacgtgatctcgaagttctctgattttctcaaacgaccgaatgatggtgtctgtgtaaatctggtgtccttcggggatcgttggatgaatcgaatcatgcgtgaaaataacggctccggggatggacacatctgctcttgaagtaaaaataagctttccatccgaaaccaattgactgaccgctacgcccagatgaatggaaggaatgccgtaatagtcggcgacttcctcttgcataagagcgcccttctggtattcgccggattgaaatgagatcaaatcccgctccttaaccgtgtatacaaacaggatatcggtaaaccggctcctcttgcgaatctgtcggacaatgccttcgatccgtgccttggattcgggcactccgccatcgttgccaacaaattcaacaaatacgagatcaggctgatgacgcagtacatctgtctccgaacgggcgcagccaaggtccgatcctgtcccatcaatgcctgcattcacagcgcggatatcggcatggggatattgccctcgcagccaatccgccgtcatgaccctatatcctttcgaacgtgtattactgccgccgaaataaacgatggtcacggtttctccattttccaacttctgaatgacattaggtagccctcttcgtgggaaaaattccttcatcacgacttcacccgccctcacttagtgtttttaggagcaaaaagttttacagcaaacacttcataatatggcgaaccatacgttgcagagaaatcaaaccggatttgggttacaccttgtgcatgcacctgatgtttattcaatgaaagataattcccacggactttaattttactctcggttccgtcttccaaagttaaagtcacatcataatcttgaatcaacgactcgattggatcgtcgaaatgctccaaattaagctgcgaattgaaaacaagatggatttcatccagattcttggggcttgcaaaaccaaattccaaccattcctgtccttctgtaagttccgaaatccagccgtttggcagaccatagggtctggagaagccgttgacgacattcgcgggattatacatatcctgggatggtagcagatccttgaaacaaatgctcttattaagtttcttcagtctggacggctcttccggcttataaaggaagctcaccgctcctgtcattttttcttcattgccatatacagcaaggtccgccgtaccttccaatacgatgtagattttgtcgtcttctggcttcttgcagctgagttccagtgtaatccagtcatcgtgacccgctgaaatcaccaagttgtagcccttcagttcgttggcgagaatatagttttccttccgctccccgccaaacagcttcacttgcaacgtttccgaatgctcggatctatttttaattttgatctgcacgctttcagccacggatgtcttaatcggcaagaccaaacataacgctttctccaaggagatctcttcggttggataaagttgttcatagcttcgctgagacgaggcacgaatcgttaatccgtctgcgaaataaggatctaacggctcttgaagccctacaatcgtttgcccgtcgcgaagcagctgcgtctgaagctcatccatatgtgctttgacgatatccgcagggtctgtatcatattttacgcataacgcagcagccgttcctaccgcctgccccatacaaccacaggttgccatgacccttgtagatccaaaagccacatgagtagcgcttatattgcggccagcgaacatgagattaggaatattgcgtgaaaataagctgcgaaaagggatattatacaatcccggcacaaagttccacgcggtggccggcccttcatcgtagatgcctttatttgcatgcagatccatataccaacctccgacggataccgcatcttcgaaatgagtcttttctgtaagatcgttctgagacagcatgtgttcccctataaaacgtctcgactcccgctttcccggaatcgggcatacataatccaggataaggttgtctacatcatcaaactcaccgctatttttgatataatcccagatcccgtacaccaatttccgcagttccaaggcgatgtcttcattattcttgataatatccatatgtccgccgtattccagccaccacaatccgccaagcccgttgattttccttggaaaagaccgatggtttaatccttttctgatactatcaaaaaactccagcttcgtaatatcatacgcaaagcctggccttttgtaaggaacggaatagtttacgtcacgggcttgaaacagaatcgtatcgcccatggtgtaatgatccgccacttctggagcgagctcctcctggtattcatgcttcgcctctcttccccatcggaagtgagcacctgcttggtatccaacaattccatcaccggagcaatcgatataggttgggctttcaaaacggaattttctttcggaagccaattgaaggccctccacccattgaattctgccgttctccatgcccgtttcatgcacacatgtattcagaaatagagaaatgttgggctcatcatacaccatgtcaagcaagaccgtatccgaaagtgaaagcataagctttttgttgtataacggattataatgaaagatcttcagtttgagttcttccaccaacccgccttcgcgagcataataggatggactgtttccgagatatgccgacccgttaatgtgaactctgacctcgctgctcgcatttccacccagaactggccgatcattgataagtgaaaccagcaacccttggcgtgcggcagcaatggcagcgcatatcccggcaattcctccacctatgacggttacatctgatttcataagctccatttggataacctccatgattagatgctcctatcatggtaatggttttgacccctttttttttacaggatttcgcgaaaaaatcatacatttttttgtatccttatttgaattcctaccgtgtcatttttatccgatattgcttaggtgtatcccccgtatattctttaaaaagtttgcaaaagtacccttcattgacgatacctacctcctcgcacaattccaataaagaataatcccggacatttaacaactctagagcgaggttgatttttttacggttaatgtagctaatcacgccttcgttcattgtttttttgaataaactgctaaaatacgatggcgctaaattcacttcctccgcaattgcctccagcgttaagcgttgtttcaggtttgtctctatataatgcatagcactcataatttctgcacgatgtaacaattggcccgcatgcacgtattcgaatgtgaagtcgccaatataggcgagctgctcctgaaaagccataaattccatggggaagtctggaacttccgtggccatcttattccctgatttaaacttcacggtaatgtctctgtacaagtctctaatcattggcgccatgatagacttgtggattttatggtccgtaacaaattgcgacagatcggcaagtgcattatccagctcttccttggaaatcttcctcttcaaccgtataagaaaatcagccagcttctgttgaaaatctgcttttttgtcattatggtattggaaccgatgcatcggtgtttttacgactttttcggtatgataatagaaatcctcactcacatttttagcttccgtgtacgcctgtttgatcgattcccaacctcggtgtggacttccaaaagcgacagacacccttttattcaaatattgatgcaaatgagagatgatctgccctcccaaggataggcaagcatattccgtttccatatcactgcggttattttcccaggataaaaaaccaataaaacaattatccgacagatccgcagctaccccactactaccattcatcactgtttcttcgatgatatttgtaatcgcatacttcaagatgttttgatctgcggccgcgtattcgtttcggaaactttcatatgtattcatttcaacgatgaaacagcaatagttggcttgaaagaaatgaaactgcatgcgattggcaaaatccgatgcccgatgagaaggaatttcacctcggatcaattcgttaaaaaattgcttgcggactctgtatttattttcaagcacggatacgtttaacgagtgaaattccgcctcttttttctcaaactcatttaaaattccggctgccttatccaacgctcgattcaaatcggcttcccgcagcggaacctttacaatgtactccaatacgttggcttgaatcgcccgctgagcgtattcgaaggatgaataggcggtcagaagtatgtattgggtatgggggagctctgccttgagctcctcaatcatggagatgccatccatacgcggcattacaatatcggatataacgatatccggtttaagttttatgatctcctcgatcccattcagcccattattcgctttgcccaccagaacaaatcgtcgatccctatgagagagttcattaaaaaacaattccaatcgttgaatgatcaggtcttcatcgtcaacaatgaagcaggtatagtctctccccattatacatctccttttggcaattctgccgggaatacagcgcgtatacgggttatttccttaggtatgctaatgatatccagcccgaattgatctccgtagtggagtcttattcgcccatgaatattattcagtccgattcttttcctttttacttcctcttcactcggttctgagattaaaatatgttttattttatcagctggaattccctctccttgatcaataacttcgatgatgacgatgccgtcctccctgtacgcatgaatcgtaattggcccctcaattccccctccgttataaccatggaagatactattctccacaaggggctgtaacagcattcggaaaaccagaaaatccatcagtcctgcttcaatatcttcaatcaagtggaagtttcggttataccgaatgttctggatctcgatatagtccgctacattgcgtaattcctggcgtagggaaaccttctcagaagcatcgtctatcccgtactccaataatgaaatgagcgacccgatcaccacatctactttctctatttgtccgagacgtatcacattgctgattgaaccaagtgtgttatacagaaaatgtgggtttatttgagactgtaacacttggatttccagcttccgctcaagttcattatgaagctcggcccggcgaatcagttccacaatttgctgtaacatacgatcgaatgctcgtgaaagatctccaaactcatcgtttcgattaatggttattgttgttgtgaggatgccttgctctacctgcttcatttttgttttgagcgtataaagtggttttcttatatatttggcaaccaaaaaagaaatgaacaaacttaaaagaagacctgcagcgagcaactcgaggtaataggtttccaatctggacaacgctgcttttaagcgtgattcatcgttgatcgagatgatggtccagttgaatttctccgttggttttttcaaaagggagaccggaataccatcgttggtaaacagttgaaggtttgtttctgtcgtatccagaatttcttccgctgacgtctctccgatcgaaaaagaatgatcttgaatattcagaggtcctttattttcagaaaatccggcaatgatcttacctgacgcagtgatcagagccagattcatttgttcctgtttattaatcttgaacaaggtttcttcaatggcatttagatccaaatcaaccgcaatggccataggaaacggagcaccgttcagatatcgaaccatcgtaacggtccagccagaatacttcgatttgtaaggttcactaacaaaggtagtccttctatttttgtcagccgcatcaaataaaggtgctctttcagataaaggttcatcgaatattcgagtaggtgtacttccacccagaatggataaatcacttttgatcaaataaatattactgacataaatactgttgagttcatacagctcccttaattgctttttaatcacttcggtattgttaatgttggctttcactgatgtttcaactgagaagagaatcgtctggaaggaggaaaaattaacagtaaaatactggtcaaccttgtctagtatttgattggtgtaaaaaatgtcattggttcttatttccttttggacatagcgataagacaattggcttatcaagatgatgcagcctaatacaaaggcaaacacgataaaaaataattttaaaggcaagctgattcttcttcgcatcgatcatcttccttttagttccgttttaaactaagaatagcatatgctaataaagagaggggctacgaatagccactctctcttcgtttatttttacttgataaggccggcttctttaaattgctggattgctgtttccttatatttctgcatgtcaaacttggtatccagcgtctggaggaaattgtcccagttggatagaggctctttgcccgtcataaatttaactaaactctcattaatgaaacgagtgcggtcagcatccaaggtatcgctagggtcaggggtcaataaatttccgggcaacgttggccccacatattgctgattgtccttgaaagcttccgctgtcttcggattctggaaactgaagtactccgcatcatcaccacggcgcggcattctataatgatcgacccataggtacttctctttcatttccttcgataactcggaggttttatttttgatcttgccgtctacaacatcccaatggatgcctttaattccgtatgcaaagttcggataggcttcttcatccgtaaagagataatttaacatggacaagatccgaatgattttgtcctcgtccgcttttgcggatatggcccatgaattgccctgaaatgattttctctctacaatttgatccccgtaaggacctttcatcggaggaataacgatccattcgggcacctcgccactaatttctttcattttctgttgataatccggttccagtctacgagcatctctgatcatgaagccaactctacccttaaacatcttttggtccaacagatcaggcgaattcatcgtcacccagtccgggtcaaccaccttggctgccatcattttattaatgtaagcaagcgcctctttcattttgggatcgataaacagaaataccggttcattatcttttatctcaacggctgaaggaggattgacgccaaacatccacatcaagctatcaaagccataggtttgcagattaccttctttattcataccaccgatgaatccgtacgtatcgtttttgccattcccgtccggatctttctctgtaaaggctttcataacttcgaacaactcatcaggtgttgttggtacctccatattcagctttttgagccaatcgttacggatgaagaagcttcgactgataccgtttacattatcatagcctggaactccaatcgtttttccttgataggacatcgcctcccaggagtcggtgccaaaccgtttctgtagttcagggaattggtccatatatggtgtcaaatccgcaagaactccttggtcgtaatattgcgcaagatcagcacgacttttcaagaagatcaagtctggaatatccccgcctgcaatgagtgtattcagtttggttgttgcttgcccagcctgaggaatcatcatctccaagtcgatgttcatctcttcttccaacatttggcgttgaatatcttcatcacgtggaggtaccggagcagcagcattaaaagtaccttggttaaacattgagattttcattttggttgcatactggccagactggccttgcgaattactcgaagttgtcgatgtaatttcttcatttcccccacatcctgacaatagcgttccaagtcctaagattgcggacagaatagcaaatgaaatctttttacgctgcatattgacctctcctttgcttgtatattatcacggtttccccgtaataagttaggttggaacaccttttatcctttaacggatcccaggagtacacctttggtaaaatgcttttgcaaaaatggataaacgatcaatatcgggactgtagttacaacaactgtagccatctgcacagcgaacgtactaacagcgccggaattggcgagcgaatcagcactttgagttgcaacgttaagcaggatgttgcgcaaaatcacttgaagtggcatgtagttggaatcattgatatatacaatagcatcaaaataactgttccaatgcccgactgcgtaaaataaggaaatggtggacaggacgggtaaggacaggggtaaaataatccgccataacgtctgaagttcactggcaccgtctaccctcgctgattcctcgatttcaccaggtaattgttcaaaaaaacctttgatgatcaccagattaaatgcactaatgagatttggaatgatcaatacccaaggactgtttaacaatcccaaagagcggattagtaaataagtcggaattaatcccccactgaacatcatggtaaacacaatgaagagtaaaaatggacttcttccgggcaaatattttttggataacgggtaggccgcgattactgtaaaaaacacgtttaacgcagtccctacaatcgttcggaacaacgtaattttatacgcctgccagatcccatgagaaatgaatacttctttataggccagaaaggtaaaggattctggtataatcacaatccctcttcttaatacttccgattctggtgttacggagacagcaaccacatatagaaagggcagcacgcacagtagggataatataataagaactacataaacgacggtttgccagactttttccccgattgtcatatggatcattctaaagaccacctcaccagatttgcccatcgaattttttggcgagcttattcgctgccaacactaaagcaaatccgatgacagctttaaacaatcctacagccgtagccaagccaatcttaagacgttccaacccttcgcggtatacccatgtgtcgataatatcgatcttctcttggttaaaggtgttggcaaacatgaatatttggtcaaaacctgcatccaggatatggcttaatttaagaatcagcatcagaataatgactcctcgaataccaggtaacgtgatatgccaaagctgtctccatttggatgcaccatccattcgagccgcttcatataagcttggatcgattcctgccaaggcggcaaggtacaaaatcgccccccatccaatatccttccatacttcagataagatgatcagcattctgccccaggcaggttccgttagaaacgagataggttcaacaccaaaatccttcaaaatcatgttaaagagaccatcgccaggggctagtaaggctaccataattccatacacaatgacccatgatagaaaatgaggcaaataagtgatcgtctgtacgattttcttaaaccattggctatacacttcattgaggagtaaagcaagcacgatgggcgcggagaaaccaaacaatagcttatacagcgatataacaatcgtatttttcatgatgtcccagaaataaacgccgttcataaaatccgtaaaatttttgaatcccacccatgggctatcccatagtcccaaagccaggttgtagtttttaaaagcaatcataattcccgccataggaatgtatttgaataccgcaaagtaaattaaggctggtaataagagagcatacatcactttgtacctttgtatcgtccttatccatgtctttcgctttttggagatgggaatggcgtccgctgccaactttgcttgcatttcatcacctcgtctttgtttgtatttgtataatagcacccacctatcggataaatttctgaaatataaagaatttcttataagattttaaggaagtgtgcctggctcgttccaacagctaatcccgggcaggtgagacaagaacttgttctactaaaataaaaaaaagccgctataatagcgactttcaaatgccgtatttatacttctccccaaaaaatctcagtttcataatcgaattcaacaataccctcttgattatttttatcaaataaattccgtagttctgtcatcattggatcgtaatttggatgcccgggtacagggctgtaagaagatgataacaaccggcctttcaatccctcgaaatcgaactcctgactcattttgaatcgcatttcattcattgaaccttccttgaaaaaagagagcaatatcgcctgagaaatatttttatgattaactttttcgtagtcggttccatatgtatggagcagttgattgtactcttcacgaaatggagtaccgttagtaagacgtgaattccagatgagtattactttcccacccggctgtagaattctgcgaaactcgatttgggctgcggagcgatcaaaccagtgaaatgcctgagcgcagacaataaaatcaaccgactgatcaggtaatccagtagactctgcagaacctgatgtactttgaaatttcggattactttctaacatttgctcggcggcttcccgcattgcctgatttggctccaccgcgattacatagcttccgcgttccagaagtagttttgagatgatgccagtacctgaaccgatgtctgctatattactgttcacacgtaaaccaacgacgtcgtacaaatagtcaatagcctcttttggataactcgggcggtatttcaaatacgaatcgacccggctcgaaaaccgttctctattgttcatcgatcgtcacgctcccatcactattttgacatcctatatactggcttcagtaacagcttcaaaatcttgctgccccaaaaagcaaataccgtcgttccggtccatgagctgcgcttatcttggctgtattgatcgttgatcatataggttcgagtcgaaataggactcttcagaccgaactgttcccatttctcgggatcattcgaacctccaagttttctaagcatatttgccgactcatgatctattttagctggaatttgctcgaatgcttgggtgatttgcgtatgaaactcgtcgattgggttacgactggtaatgctctcgagatgaatgctttcacgaatgtaagaaacaaatgccagatggtcagcccagaactcgtcgatataaaaaagccgtacacgccgctccgatggactcatcagtctctcagctttcaaaattccgagccgttcttcatatagaattcgcctctgatcctccaccatatccgaataacagttcaattcccgctgaatatcgaagttttgacctataataacgcgctgaatatgctcgattttgctgtgaagcgccggatcatcaagaacctcgtcctgatttggggcgcgaaacagtctatgaatgccaaagcgaagcatcaactcgtcctccaggctaatataaaatacggaagacccagggtcaccttggcggccgcaacgtccgcgcaactggtcgtcaatccgcatgctttcgttcacatatgtacctatcacgtataatccgcccagtttggcaaccacttctgcttgtgcgggattaccgccaccgagacgaatgtcgacgccgcgccctgccatattcgtagataccgttaccgcgcctatttctcccgctttagcgatgatttcggcttcttttgcatcgtttttggcattcagaacctgacaaggtacgctagcagcggcaagcgcctccgccagcatatcagattcctcgacgcttgacgtaccaataagaatggggcgtcctaccctatggacggaagagatttcttgtacaagcgccttatatttggcttctttatgggtgtaaattcggtgtttgtggtcgatccgtatgtttggctggtttggcggtatttgcacgacttgcagcgcatagatatcctcaaattccattgctgaagcatgcgccgtagccgtcattccgcaaattcccgaatacaggctaataaaatgttgaatagtgatcatgccgagaattctcccacctgccttccactgcaacccttcttttgccaccagcgcagcttgcagcccgtccggcaaatacctgtcctcggccacacgtccggtgtgttcttcgattagctcgattacaccgtccctgacgatgtaatcaacgtctttttttaataacgattccacatgcagcgcacaattcaatgacgttaaccaatgactgttatggctatcgtacaaattgccacatcccagcagcaactctgcttttgcagcacccgcttcattcaagtaaacgttccgctggaactcgtcaaaatcgtaatgctctcctggctgcagctgccgggccacttctgcgaaaagaacgccatcacttttggaagcactcgaatcgccactaatgactagtggcacccgcgcttcatcaagaagcagcgaatctgcttcgtcaacgatgacgtaatggaaaggacgatgcacggtatcagcttcattgaatgctattgtgtcgcgcaaataatcgaaccctgcttctttagctgtaacataggttatgtccttggcgtaagcttcccgtttctcgaataggctcatgcccgattgaaccgagcttaccgttaacccgaggaagcgatagatcgggcccatccacgccgcatctcgatttgccaagtagtcgttaaaagtaagcacatgaacgcctttgcctgtcaaagcgttgagataaacaggcataacggcagagagtgtttttccttcaccggtatgctgctcgatcaaaaatctctcgtgcaaagcgatagcagccataatctggacatcataaggctgtaatccgagtgttctcttcgcaacctcgcagactagagcataagcatcaacaagcagatcatccaaaggcttgcctgatcttgcttcttcttgcagccgaagagattccgcttgcaggtgctgatcatcccaaacttccaagttccgtttcctgataagctccactttgtctcgataatccttcaacaaacgccgggtatcgcgctctttgaattcacgtatcaacttgacgactacattcatcggattctgattcctccttagtagaaataagttgtgaaaagaaaagactccatatggagtcttttctgtcgatgattaacgcgccactcaaaccattcgttataagagaaacctacattacttctccgatgggagtggtgtaaagagcagattgaccggcaggttgcttcctggtgcggcagagaatagaatggtcacgctctctccagttgaaccggtgcggtaaagcacgctttgttcacttgaattggcaaccgcaacgttaccttcggcaatcgataccaactgattgttcactagagctactccggagtacttccctccacgagggttaaaggagataagcgtacgcggtgcaacattggtcagcgtgattttgtacaatacgccaaaattacccgcattggatgcgtctgtgtatgccatcggatctgttcctaccagattgggatcgcttgaattgtcaccaagtggcagacgggcaggtttgattcccacgtgctcatcgtactttataacgcgagtcgcattcgggtacgtaccccggttgtgcactccgtcacgatcaagcacaggtagcaatggcagagcctcgaacggatctttattttcttccaccaggataacgttatagtctaaggaataatcgctataagcgtccgaatagagagagatgacttgtccttctttcatcggcgttttattaagttcggtcaaaatcagtttgctttccccaggttgaaggtactctttcttttgatccgctccagtctgaatcgacttgaaccatttatcaatagacaatttcccagctacggtagcatacggtgtaggtccggcaaagcccatattctgttgttcaaatactgccggattcggattgttattggttgcaatcacatacatttttactcttttgcctgtattgttcacgtggtgaatcatgaaacgggtctgccccgaagatgattctttatatacaatgccttccgtattcacagtttccggactgttactgcggatcagcaaacttggctcatccatgtacgtataaggcactttctccatcgtagtcacttcgccgccgttaaaggtgaatttctgtcctaccggcgtgaagagtaaattaaaatcggtaaatgaatataaggtctcattggttatggtgatgactttggagtacgtgttcgtagcaccgtgattgtcagttaccgtaagagtcacggtttttggacccggttcaaagaacgcaagtgaattgttctcccacgccgctttaacaatattattttcatcatctgtactttggtctgtgtatgttattttttcgcccattttatactcttctttatccgtggcgaacatggctacaggaggaagattaggagccaaaacttcaatcgtagttgaatagggatcgctccattgaccattggaatcctgtacttgatatgaaatcgtatatgtacctgcttgatcaaatgaatcctggcgaccagtccagcgttcgtcaacgatatccattccattaggtgaactggaagaagtcacgtagtctacttgatcacccgcaaaaatttccttttgggaaatggtaaagcttgcaacaggttttgtattaagattcaacacaaccgttttagccgactgattcactttataggtgatgttcagagcttgagtaatggaagttaacggcaccatgaatgtacttttttgctgataagcagggcctttcatcgttctggtctctccatttaccgtatagtccttgctgttagttttgaatcggagttcatcttcaccactaataatgatggtttccttggttttgttatcatatttgacgccatatcccacacggtcaaccagcgcacggattgcaacataggatacaccgttttttacagccattggctgtccagcaagatacgtttttccatcctgctccattttgttgctattcatgtacaacgtcagatttccacctgcaactgcaggagacgtcccatcaacggatggttgctctatctgagcaggcgtagctggcgtttcaaccttctcaggggtttcctcttgaactacagtttttgtacccgtttcgtttgcaggggtctctcccccatccaatgcaggtttctcgctatctgttttgggtgttgcctcagtgccggttgaggtttgagtgtccttggcttcagtgggcggagtattgatagatttgttattgctctccgtcttcacttcacgctctgcaatcggctgctcttgctgtaacacctcaactgattctacattggctgtgtttactgacgcggtgtcaccttgcggtgctgattgcgcactcacagaaccaactgcaaatgcttgaaaaacggctaaagcggtaaaaatggataatttcttcttcatattcatgtgttgtctttggctccttctactctctagtaatgtataacccctcaaaaagtcatagtattagacgctagatttaggaaaaagtttctaattgaattgtaaattatggatttttgtgcaactattttttcaatgtttggttataagttctttgaataagaagcgcctattgcataatagtctcgattttgcacaagataatccatgtcgcattttataaagaggtggatcaatgaccccaaccaatcaggctttttctgaattaaaaatgaatatttcttatgttgaacagtccctctactgtactgacgatttgaaacaacaacagcttctacttaatggtgtacagagtgtgcttctctatatcgattcacttgtagatcaggagatcattcaaacacatgtcttaacagcactgaatggccaagctcattcggaaatctacccatcgttcaccactttagaaagtcgaaaagatacggatctgcaacgtggaatagattcacttattcaagggaaaagtctttacataatcgatgggtacccggagttttacattctttctaccgagaaaatgtatgtccgaagcaccaccgaaccagagaatgaaggcgttattcgagggccgcacaatggattcgtagagcagctttcggttaatttgaatctgatccgtagacaaattattagtccatccctaatcgttcgatattttaacgtcggcgagaagacacataccaaaattgcagttgtatatcttcaagacttggccaatccggagttagtgaacgaagtaaaagagcgaatcacgtccatatcttcagatatggtgctcgctccaggttttattgaagagtttatggaggataaccccttctctctgtttccccagcagctcaatacagaaagacctgaccgggttattgccaacttgatggaaggacgtgtcgccatacttgccgaaggaagtccttcagctcttattgctccagttacgttttttgctttttatcaaagtccggatgattatcatggtcgctggattgtcagttcctttttacgtttaattcgcatgatgagttttgtcattgcttttacattacctgctgtttatattgctaccatctcttttcactccgctattttaccgatcgaactggcacacacaatcaagaaatcattgcagaacatcccctttcctgcacttgtagaggcaatgttgcttgaactgatctttgaagtattaagagaagccggggtccgacttcccagccgagtgggccagaccatcggcatcgttggcggtttggttataggagatgctatcgttcgtgcggggcttgtatcctatacaatgattattgtggtttcactaaccgctatctcgtcgtttttggtaccttcgcatgagatgagttcggcagtccgtattctccgctttccaatgatgattggagcggcgctttttggatatatcggcatcgcatttggtctggtgattctaaccattcacctctgtaagatggaaaacttcggatcgccttattttgctccagtggcccctttccgattagctgacatgaaggatgtatggattcgatttcccatctgggcgcttcgcgggcgtcctcatgatgcccgcccgcagcggctgaatcagcagaagttctctaggagttggaaaaaacgtgaataaggaaacaacaatcactcggggacaattattcttgctcattttgaaatttgaaattggtgtagatatcctgtccctcccttaccgtatacaccttctctctaaaggcggtgggtggatctctgtattccttggagggttcctgatccaacttgtcatattgttgtgctggcttttgatgcgaagattcccgagttcatccatttatgacattgtaacgctgattacgggtaaatggattggcaagttgctgatcattgcctacgttggatatttcctgttaatgggtacttctgttctggtgaacgcctacagtgtgattaaccgctggatgctgcaggatacgcctcggtgggctatattagccctcttcttgttcagcagtatctatttggttcggcaaaaattacgaatcattgcccgagtacttgtgctcatctcctttttggtcttgcccatgatggtattgatcagttatggactcaaggaaatcaacctgttatatcttttgcctttaaccgaagcaggatggcccaatattattagtggatcaaccgaaacattaatggctatgtttggattcgagttttttctcgttgtgtttcctatggttgaaggtagcagcggtggcaaactcaagtctgttgctttagcaagtgctgtagtcgtggtgttgtatgcattcaccgtgttcatttgttcaacggcgttcagcccccagcaacttgacttaatgcctgaaccggtcatatatctgctccgctctatcccactcgggacaatggatcgggccgatttcctgttcctccctatctggttaatttcaattttcggggccatatgtggctattactatacggcatcctatggtataagttatctcttcaaacaaaaacaccataaaaaagcggtgccttatgtcgttcttgcttcttgcataattgcctatctgccacaacagaaggaaaaacttgagttaattagtacgatagccaacagatcggcatacttttttctcatgatcctgcctctgctcctgttggttctatcttatataatgaaacgaaaagagaagatgatatgagtaaacaggggaaaatcctcatcctgctgaccctgctcatgatgatgacgggatgttgggatcaggatagtttaaaagatgcaagactggctaatgcttcggcgtttgacatcacctcagagggtgaaattaaacagacgcttgaaattgtcgatgattctgagagtcaacaagggagtagcggtaatgaagtccactcaggtactgggagatccgtccgtcaaagcacggatagaattcgcgctaaagtgactggtgatatccggtttttcaaatatgggatgatcttatacggcaacaaactcgcacaaaatgatatctacccctacctggacgtcttatatcgggaacccgattacccaacatcacatgtgaaaattgctattgtggatggcgatgccggagatctgttacaccaaaaaaaagttggcagcatattgattggtgattttattacgaaaaaaattaagagtctggaggaattatgtatttttccggaaatgacgttagagacccttctccctcccatgctggatccgggacaggattttacactgccttatctatataaggatggagaggagattgatgctcggggaatcgccctgtttcatgggcaaagattcaatgggagtcttacgaccgaacaggctcctctatacattattatgagtgggaaatggaataaaacagcgcgttttgtcaaaaaggtccacccagggccttccagcaacccgcggaactatgtcacttatgaagcaaatatcgcacaaattaagcgcaaacttgcggtaaaggtggcaaatgattgccaaattgatgtgaacctccgtatcgaacttccagtaacgatcgttgagtatgcaatgaatcatcttcaggaaaaagacacaattgaacgtctgaaccgcaagttaaccgatgacatgactcaggacgcagaacaaattatcaagacacttcagcaaagtggttgtgattccttcggtattggcagacatttaattgcccattacccggacttatggaaaagcctaaactggaataaagaatatgcccaagttcgttttcacccggaagtaaaggttacaatagtcggcagcggcgttttaaattaataacatgctgtcgtgcaattgggaaagctctcttccatttggaagagagcttttgactgttgacttaaaaagaaggatttcctaatacctctagtcgttaagaagcacttcagtgaaaagctttatcgtgcctggttgagtataacatcggcagtgaagctgagctataaaataggtgaaagaagacgtgatattccttctttaaatttgataataagggacctgtttctataacgatcagaagtaagttctgtacttaactggctatcttgatgaaacaattcttgaagttgtttcgcaactcgctcgtcatatacaattgcattcacctcaaaattcaacctaaagctccgggaatcaatattcatcgtccctactgaagcgacttcttcgtctactacaatggtctttgcgtgtaagaatccattatcatacaacagaatcttggctccatagtccaataattcaccagcatacgcccaagtcgcccaatatacaaacgggtgatcgggcttattgggaatcataatgcgcagatccaccccggatagcagtgcgattttacatgcatccataaaagtgctgtcaggaataaagtaaggcgtttgaatatacacactctttttggcatttactataagcttgatgtacatattcttcaggtgttccacctgtgagttaggaccactagacacaatctgaactggacttgaaccatcaagccttgctgtgttgaaggagtattgttcgtaacttacttgatcggatttgctggcgtgtttccaatccagaataaaccttccttgaatatgattaacggcatctccgtgcattttaaaatgtgtatcacgccagtatccaaactttttatccatgcctagatactcattccccagattaaatccgccaatataagcaatctccccatcaataacacaaagttttcgatgatttcgattattcatacggaaattcaatggcctaatcagtgacgggaaaaagacctctacttctccaccggcagagatcagttctctgaaaaacttcaatgaaagtttctttgaaccaatttcgtcatagagaactcgcacttttacgccttctttagcttttatagttaattcatctcgtaatttcttccctaaggaatccggttgaataatgtaatattggatgttaatctctttcttggcttccttgatatcagcaaataatgaatcaaatttctcttgtccatcatcgaagatgaatatctcattgtcattggttaggattgcattggatgatgtgagattcaattgaatcaggtcagcatatttcatgagcagggggttgttttccttacgttgctccttcaatgtcactaactggttctcgacaattaactttagggagtttctctcttcaactgaaagtccgtagaaatttttctttttgaggttacgtcccaaaaagagataaacgataaaacctaaaataggaatgaagtaaaatatcatgagccaggcccaagtataaccaatgtctctcctttcaaaaaacaaaaataccgctgagagtaatatgtttataatcataacgagcgaaagtatcagcgtgaccatactgctatatctcctgccttccattgactttatgtaaataataaaaagtgcttattacttagctattctcgaatgaagccgtcatcacaaagaatatgataacatacttgaggaatactaaatctattaaatgataatcactagacattgaactaaaaaagaatccactttctataaaagaagggattctttcacattgaatatcctatacttagaatctgtaattcaaagagaacgcaattttgatacttgttgttcccgcaccggctccaatgagacttatagtattaattgttggtgcagtataagatctactgctacctggggctacgacaaaaccaggaatttgaacaccgtcaataagcaaagcagcggtgggtgaagcccccactccgttattctcaattagaatagttccatttaccagaaacgttgaggaattttcgtatataattgttggtgtcccacccgtatctgacaaacttatcgtagtacatacggcatcgtttaccaccgctggagaaaccgtattattacaattaccaatttgagccatttgtgaacctccttaaaaatgctctttctataaatatatgtggggagatagtagtggttcgggctattccaactttgtttccatttattcctcatcctcttcttcatttagaacttgatagtatatatctattccaaatgtgccgcttgcaatattgtttaagctcttttcaatctccacttcaatatgatgcattccggcacagctaaaagcacaggtgttacccggtagaacaggaagcgaacacgttccttcattatgtattatgttcaaaaagacagatgaattactttgtttatgattataaatacttactgtaccatgtacgtttaaggttgaagatgctgaccacagggttaaaacctctgttatggttgctgaatttatatggaactccccacaaatagttgtttcagcgagacgagtattcactcagactgctcccttccataattcttcctttcatctattttattagtgatctgctgttttcatgtatgattatgctcctaatgaacaacataaaaaccgctacattagcggcttttaatagtactatgttcgtgactttaaacgatatacgaccgactatccaatctcccctgctcgttagttccttacaacaggaatccacatttcaccatataccaaaccatttttctctcccatttcaactgttgtattcggaccgccaacataggcataatccttttctatggggagagcttgaccaaaggcaatgccagtaagcatattactgagcgcatcagccgtctctgcttcacccttcacaacaaggtattctcccttaggaaattggattactctcgttgcttctggcagagattcttctgtcatgacaccagcataatgcatcatctggttattcactgcttcgtttacggcaaaaatgtagtcgtttgttgccagagactttagtttgtccagacttccatcctctttcaccgtggaccaaaaatccgccttctccttactgatgccaacatagtctgtatagtcgctcttaagatccgttccaatacctaaaacaataaagctctctttttcttcgaaatgataattactcatggtttacaccgtcctctttcaattttcaattgatttgtgttttcacttgataggtttataataaccttaaatcatgtcagaatatgatactgtttagggggcccaatgaaaaaagttgaacgcataaataccatcacgcggtatatcaataaccgtgcacactttaccatttctgaaatcatgcgagaatttaatatttctcgttcaacagccattcgagatatcagagaaattgaagccatgggaatgccacttgtcgctgaagtaggtcgggatggcggatattttgtcatgaacaactccctcctgcccacagtccggtttaccgataatgaaatcaaagcgttattcatagcctttatggcgacaagaaatcaacaacttccttatctgaagagtcgtcaatctttggctgaaaaattattgggccttatttcagaaaatcagcaagatgacctggtgcatttgaatcaaatattgctttttgaagggaccaatccccataatccagacttgcttgatctatccgacttgcctcaccctaccttggaaaaactaatccaaattcttcttatagaacgttatttgttagttactgtccaagaagagaagaaaacaaagtcctatcccatcgttctcttgcaccttcatcatcaaaaaggccattggatcattgaaggttttgatctggaggaagaaaaaagacgaatcgtatccgttgacaacctcatccatgtcgaagcatacccggcgaaaaaaagactgagtacaaaaaagattgtagaacaactcaaacgaaatacacaggaagaagttatcaaccttgtcctggaacttggtccaaaggcgattgcgcaattcaaaaaataccatcctttaaagttttcaattgcctatacaaatccataccagactacggctctcctaaaggcatttatgaatgttcataactcggaagaattaaccgaaatcaccaattggttgctttttctaggtgaagacatcaaggtgaaggagattccggaagaagtcctgaatgctgtacaagagagattaagcttataccaaatgaagcagtgagcagcccctcctccctagtctctccattttctaacaatgccttacctgaattcaggctgagggttcagtacggaaaaccaaaaaaagccgctattgcagcgacttataatggaatcatattcatattcattcatgtctcacgctaatgcttggcgagctgttccttctatactagaagtcagcattagactgggcatgattaggtgtatgctgcgggacgtttttaacgagtaggaaataagtaacaatggcaatgatactggtcattaataaagtgagtcctaacgggacggcagtgtcctcacccgcgatgccgaccagaggagcaaccagtgcacccagaagaaaaggaacaacgccgagcagtgctgctgcacttccggccatcttagcttgactctccatggcaagtgggaatgccgctgttgacgtaatgccgatcgagcatacaaagaagaacaatggaatcaccaacgcgaaaagtggaccatgagccagggttacgaccaaagcagcaacacttgctattatagcaagccaaagtcccgataatagcagcgtctgctcagggatacgtttggccaatcgacccacgatttgagatccgatgatcaagctgatgccgtttgaagcaaataatatagcaaataccgtcggtgtgactccatatatattttggtaaataaatggggttccagccacataagcaaagacccctgctgtcatgattccctgtgccagcatgtaaccaacaaacttgcggtcacgcagaagcattctgtaattacccaattgctgtttgaagtcaggaaccatacgtctttcgacgggatgtgtttcttttaagctccactttgtcatgattaataagaaaatccccaagaatgaaaggcagataaatacgccaatccatgttgtgaaggaaagaaccccacttcccgcaatcggtgctgccaaaggccccaaattccctacaagcaacagcaaagagaaaaatttagtgagttcatgtccactatatagatctctagctatcgcacgggaaatgacaattccagctgatgccgcaaatccttgcgtgaaccgaaacaaaattaatagtccgatattcggagcaaaagcacatgccaaggaacaaataatataggctgccatacagatcaacaatggtctacgtctaccgtacgcgtcactcaaaggacccataacaagttgtcctacaccgagtcctaataaacaagcagtcaggctaaattgtacaagtgatgccgttgtattcatattttgtgcaatctccggaaaagccggtaaatacatatcaatcgtaaatggacctaatgtagaaaataaacctagtagtattgccagtccaaaaacattccaattcgtgctcttcgccataataaataaaatctccaattccttatataatttgcaagcctaatcgagtataagacatagagttaactgtaggtcaagtcttaagactattaaaaccaaaaaaagccgcttattaagcgactttgaatggaaaaccatttaaattgtgtaactcccccggcctgaacctatatgactcatgatcatttcggcagctcgcttgtaaccgcctgcctgccttaaagattcaccaatgaggtaagcctgccgtctataaagtgaattgtgtagtacttctgttaatgcctctctcaaatcagttgcattgaggttatgtttatttaaagtaatacccgcgcccaactcctgtacccgattggcgacaagaggctgatccgatgttaatggaatcataaccatcggaacgttgtaatataacgcctcacttgtgctgttcattccagcatgtgtaataaaaacatcggtatgctgcaacatgtccaactgggcaatgtatggcttgacgataaaattaggaggtatttgatcagccagcggctccatatccgtgtattttcctgaagataaaacaacattcacgggtagatcccctaatgcttcaaaacaaagctgatagaaatccaaatttttatttaaaatcgtacccatagcaatgtacacggtttgcgggtaccgttcacgaagcacctcaaacgagaaggtcggagcatcttgacgtgttatgatcgaaggacccgtgaaaataaaacgatcatccagcttttctgcctgcggctgaaaataacggctggtgtacacgagctttaactgacctacatgtgccggaatctcttccatggctggaatactcacttgaagctcttcagctaacttcgttgtgatcttcatcgtagcctcataaagctccttcgtctccgtctcattcagaactgagctagaccccagaggctccacaaaagcaaaggacgcaatcgagcacaccgcaggaattcccagtttttctgcaagaatagtccctccccatcccatcagggaatcaaagatcatataatcaaacttttgatcctcgataacctgtagcacattggggatgatcctccggataataccgcttaccatcatataaatgaactgataagaatgcttgtattcctggggtttcaacaccggatcatgagagaaggcatcttgtggaaacggataggtaatgatctgggcaccggtttgttcaattcgggaacggtactcctccgtgcacacatagatgacttcctcaccattgtctatcaactgagtaactaatcctaacgatggattcacatgtccttcagctggagtaatgactactaatacacgtgccatcttacccacctcccaatgcaattagtccccccgttcttcatgatgtatttaacgacgcggtcgtcatccgttacatggagatgttatccttcacttggctgattggatgatgttcttgatgaacgagtttggtaattcgtagtgatgctaagaaacttaacaagacccataataattgcagtgttaacacgatcaaaacacctgtcgatatgccccactgtaacgtttcggacaaggcaatcagagcgccaccaactccaatgcttactcccatatagaaggaatccacaaattgcagattcgcagacatttctccctctttcctgggcaaggcatgttgtaaagcaatggctgccgttgtagggttggccaatccaacaccaaaccctgtaatcatttgtgagagaaggatgagtataatcccaccgtccgtcaaaataagagccaggatcacaagcgcagttccaacgatcataatcccaatgcccgtcatgaccctaccctttcgggcccgaccttgatctcgtgcatcaagcttggcttgtaaccacgctgcggcggaccagctcagagaacctgctgctacgatgaggccagcaaggtcagctgataaccccttcacttcggttagcgccaagatcacaaaactttccgttgtaaaataacaagcaacatatagccctctcgataccaaagtagcaggcaatcctttttttaccgaaaaagtccctactggcagcaatttacgcattggtgtgatcatgacgactaatccagccaaagtgagtactatgcctttccaatcggttatcataccaagtcctgtgagtaacagccccgttccaaccgcaagcagaatcgcatacataatctttgagtcggttgctcgcgctggacctgacagatcttgctgaagctgcaaattacggaaagaacggaatgtgagactgagcgctattccaatcaagggtaaaacgatccagaaaacatatcgccacgagatgtaggaagcaataaggcctgctgcataaggtccgattaaggttggtaggacaaatgccatagagaatgcggccaggatttgagtacgaagtgtatctggataatgtaacgtcacacaggtataaacacatgtgatcagggcccccgctccaaaaccttgaagggctcttccggcaataagcatgtgcatatcgaaagaaatagcggagaccacagttcctaacacaaaaacactaaaagatatcagcatggatgtaaaaacgccgcgcttgtcaatctgctgacccataaccaaagttccaataagctgagataacaaaaatgcgctaaaaatccaaccgtataaatgaataccctctaaactttgtgccattttcgcggcaatcgttgtgatagccagtccttcaaaagctacggttgccagaaccagcataatcccaattgtaggcgccctgtactgagcatcaaaaatcccaatctgattgttgtttgtcttccacacctccataatttgatgggtattatggtaaaataaacctttttactccctgaatatacatgaagtgttatactttgtaaagttaaatgtttaaaaagtaagatcatgatttagaatagggttccccatgttcaataggagattttgcttgaaaatatgccatcttcattacagtcaatttggagaagttcatcctccaggatccaggcatctgttttttcaacaaagaaatgaaatcctccaatggattgaaccaatgcgggatcgaccggtgtagcactcgcattgatgccaattgtaaaagcatcggagcctcctccgacatattttgcgtaaatccttacatattggtcctcttccaattcccattctttcttaaatgaatcgattgcttgttcagatactacaaatgagatcattgctctgcactccttccttcattaatcacattttttcacttcgccacgataattggccattctgaaactggctccgcatccacacgaaactttggcatttggattattcatggtgaatccgcctaacattccgctctcttcatagtcaatctcaagaccatcaatatatggaatactgttcgcgtgaaccaatatcttaaattgctttttatttaacacaatgtcttcttctgcctgttgttcatccacaataagggtataagataaaccactgcatcccccttcatcaacgcctactctaaggaaggcattttggatatccgcacttgataagatctcaacgattttgtccgatgctatatcactgacctcaatgatcatctttattcctcccggtggtatcattttgaaatttggtatcccagtccattagacagggtatgaatgccgcaagagcagctccttttggcgtaagttcataaataatttgtgtatggcgtgtcattattgttcttttgaccaaatgatcaagttgaagaccctttaaacgtctggagaggatcatttcggaaatggaaggaatgatatcgaatatttcaccaaatctcttcgggccttgagacagagcacataaaatatggatcgtccatttcgttccgatgatgcgataagctgtaaatagtttattcgggtcttcagtgaacaatggtctgtacacccactttcttattcatccgcgtgttgagatccgagtgctggcaatgatactcgtgacgattaacaagagatggaaacccatggctacaattaagccggattgaagtgacataccgccagcctgacacacgacaagaatggaaccaccaatgccgatcactacaccaggtgtaaaagaatctgcaaattgcagatttgccgaggtttggcccacgccttcttcccccgtttgggaaaatgcgacaacaccactaatcggatgcgccaatccaataccaactcctgcaatgatctgcccaataactgcaatggtaacggtcacaacaggtacccaaaatacgatggcaatccctgtggcaagtaacattacgccaagaataattctcatatgacgtccactgccctgatctgccgcatcccaccgtccttgcagatacgcaatgatacaccaacttaatgcagcactcgccacaattaatccggcctgagaaggtgtaattccttttacatcgattagagccaataccaggaaattctgtgtactagtataggcagcgaagaacaatccacgtgttgccaaaatagctggcattcctctgcgcaacgtaagtgttcccttcggtagcaatttacggagaggaaatatcatcaatactaggccaatcacgactaaaacaaatcccataatactcggaagcatacttaaaccaaccaggaaaattcctgtacctaacgttaagagtaacgccatccaagtggatgaagatccgctatcccctcccgtcttctgcactttcaatttcctaaaggcaggtaaactaagcaatgctgaaaccactagcacaggtaagatcccccagaaaacaaagcgccaggaccactgatctgcgataactcctgctacatatggaccgagcatagacggaagaacataggctgtaccaaatgctccaagtattttggcacgtaactcatccgggtaacttaaggatatagccgtatacacacaagtcatcatagctccggcacccaaaccctgcagggcccgtgatcctatcatggtatacatgtcgcctgcggttgcggcagcgatcagccctacgataaacaacagaagtgcaaaagtgaacggtgctgcaggtcctcttttatcaatgattcgaccgacgaccaacgttccgataatctgcgcaagcagataggtactgaatatccatccgaacaggctaaggccgttcaagtctccagcaatggaaggagcaatggtggtgacggataaaccttcgaatccaacggccatcactgacaaaataatccctatggttagtgcaaaataacgcgggctgaaaatactttgatgattagacgacatgaaatgtgacctccaagaaaattggtatgtatacatcgtatccggatacttagtaaacatttttgtttataatgtctaagctacagttcggctttgactttgtcaacatttttgtttaaaatgtagttagtcatgtagactcagttgcgtcacaaggaggtgccccatgagcggaaatcaaaccaaaaaagatgtctcgaccagtacccgaagagcaattattaatctgttaaaagagcgcgggggaatggatgttgtggcactctcctctcagttttcgttatctggaatggctattcggcaacatctgaatgcgctaaaaggagaaggattggttaccactgtagaagaggcccgtcccatgggtcgtcccaccaagttatggatattaactcccgcggctaatcgttttttcccaagtggatattccgatttatccgtcagtctcatcaattcgatgaaagaggcttttggtactgaagggctggacaagctgctggatgttcgaaataaaaatatgcaagaacaatatcttcagcatcttggtgattcatcaggagttaaagagagattggagaaattggccgaaattcgtaccaatgaaggttatatggccgaggttaaggagcaggatgatggtagtctcctactcattgagaaacattgtccgatctgtgaagcggccgcggtatgtaccgggttatgcaagaatgagctacatttattcaaaacagttctaggtgataatgttcatattgaacggggagaatacattctagccggaggaagaaactgcgtatacaccgttagacataataagccatgaccaaaagagaaacctcattggagattgctcttttggtttggtttttgaactgattagaaagatgcagatttctttaaatcatccttcattataccggttatttctaacattttcataatcgtatgtacccgattatgtaattttgaattgaggtagagtatagtaagagtgtcgaaaatatactctaggaggctactgccatgtcacaaaaaatctggatgaacctgccggtgaaagatgttgtgcaatccactacctttttcaatgaaattggattccatggggagaatgttggcaacgagagagcccagcttgtcataggctcaacaacgattctcctgtttccggaagcaaccttcgagaaatttacaggtgccaaaaccgcagatacttcccatagcgcagaagtgatattttccattggtgctgacagcagagaagaagttgatgcttttattaaaaaagtcgagttagctggaggaaccatctttggcaagccgggtgaaatagacggctggatgtacggcgcgggatttgccgacctggacggtcaccgctggaacctattgtatatggatgagagcaaaatgccgaaacggtaatgtataacggctatcactacatccgcctcttatccttcaactttggagccctcgaatcggccagtcatggagattctgaagtaattcgttacgatactaaagataaggaacacgattcctccaactacaatatattgtgtacttattccagttacgattagtccacatacactagcaccaagtgttgttcccaggttggaagaggttagaaagatcccattcgacaattcgggtgcctctggtgctgccgataccacccaatattgagtgatattgccccctatgcctcctatgatcccccaaatgaaaataaggaaggctgttggcacactgaattgtccgaaggtgaacaacaagatgtataccgttattaatgcaatgggatacatcttgatcgttctcaaagggaaattagcgagcagtttccctgctatcatgttcccaaccatattggccaagccatatagaaataacaacacactgacggtgttccagtcatatcttgtcacggttgtcagaaactcggcaaggtaactatagaccccaaatacagctccgttcatgaaaatcacgccagcaatggatagccacatcacggatcttctcaatacatacagatgagtacccatagagattcttttcgtaactggcatggagggcacaaaaagaagtgttgctacaaatgcaacgatcgttacggcggcaaagaacaacatcgcatagaacaacgatgtgctggtggcaatcaagctcgaaaggggtactccaagtaccatgcctgccgacacgcctacaaatactttagccactgccttcggcgcttcttccttgggaactgacgccgctgcgaccgtaaatgccaatgagcaatagaccggatggaaaaaagccggaacgacacgtgcaatgaccaataccgtaaagtttgatgtgatagcagaaaccaggctacccacaataaaaatgccaagtacaaacaacatgacatgcttgcggtttatgcccgaaaataataacggcaaaatggggccagatacagcaaccgcaagcgcaaaaagactcacaatcaaaccagcggttgagatactgacctggtaatgttctgcaatcaaaggcaagattccgattacgcccatctccgtatttaaaatactgaatacaccaaaggtcagaatgaatacaagcagttgatttcgtttagttgtcatatgccatggatttagagagatcccggtaagcattgatctctgtctgaaggttggcaattttctgctctgcaatgtctatcgcgtcggctcctgcaatgaagcgttgcggtggttgggcctcgtcaattgccgccttaactgcggaaagtgcatctgcaggctcgcaaacatctaatggcacaaccattacattctcggaatcaccgatcgcacgaaccactgcatcgggattccggccggtagcaacaaccttgtgtccagcagttaaagcagccttcgcaatagttgtgcccatacctcgaccagcgccagtgataaaccatacttttgtcttatccatatcattcattcctttcaatttcttcttcagttgccttgctttttagtttagcgtttatacaccacatagcaaatactcatatcttataacaagttatgcttgaaaggcatttctgtaaggtttattgtagaatataaaggataaaggaggagttacgatggagattagagtattgcgttattttcttacggtcgccagagaaggaagtattacacgcgctgctgatttcttgcatgttacgcagcccaccttgtccagacaattgaaagaccttgaacaagagttgagaaagaaattatttattcgcagtagttacagtattattctcacagatgaaggtatgcttttaagaaatagggctgaagaaattgtgggtatggtcgataaattagaggcagaatttgaatgcatggaagaaaccataagtggagatatttatataggcggtggagaaacggaagccatgaaacagattgcaagagtggcaaaagaagttcagaataaatatcccaatatacgctatcacctatacagcggtaacgaagatgatgtaaccgagcggcttgacaagggactccttgacttcggtattctaatccagccagcggatgtctccaaatataactatatcaacttctcggacaaggatgtttggggagtggttatgagaaaagaaagtccactcgcctccaaagatacgattcgatctacagacttattacatgttccactgatctgttcacgacagtcaatgaaacagacattttcaaaaaatgagtttgcggattggtttggcgaagattttgacaaattaaacgtcgttactacatacaatcttgcatataatgctgccattatggttgaagaaggcattggttatgcattaacacttgataaaatagtgaatacgtccagtgaaagcgatctttgtttcagacctctagagccaagacttgaatctggcttaaatatcgtttggaaaaaacatcaggtcttttcgactgctgcggatttgtttttaaaagaaattcagactaaattttagactgataaagggattaacgttagtataagaagaaacccaccggagtttaattctcggtgggtttctttatgacttgttcaatcccgagcaaaataagcttcaagccgaactcgaaagctctgtcggttcccatcacctcaaacagaccgttcttatacatcctgctaaagagtccagcttccttctcactcatagaatccagaagatgtatcatctcttcaccctgaagtgcttcctggtccttaataacagcagagatattgcgctgatgctgataatcgtcgagtacgaaatagaatacatagttgaccagtgtaagaacggcctgtaatttctgctcttgctctagcggtgttgattccatgcagagcaacatgcggttggtgaagcggatcatgtccggttcatggggcaacgtcatcatcatgagctgtgtggagcacgggtatctgctgagcacactccgtaccgtcaccgcaagcccctccatctgctccttccagtccccttcagtatgaaactcgtccagaataattttcgatatctggttggccagacgctggtagagtgtctgcttgctcttgaagtaccagtatagagatggagcctgaatccccaacttgtctgccaagcgtctcatgctgaatttctcgatgccctcttccccgagaagctcccacgaaatttccaaaatcttatcttccgaaatctgaggctgttgttttttcatcagtatccgcccttttatctaacagtgtaagtttatgctttacaggttcataagttcatgataacatctaacactgtaaggttcaatctaacggtgttagattagatcaatattaacgaagaaagtagtgacccacatggatgcagaaaacctccattactttgaaaaagcaccaatcgccaaagcggtagctcattttgctgtcccaatgatgctaggcacgtcaatgagtgttatttactccatcttgaatgcctatttccttggcacactgggtaatacggcaatgttaaccgcactcgcattaactttacctttattcgcggtcatcatggcccttggtaatttaattggtataggcagcggcacattcatctcccgtttgctgggagagaaaaaagtagatgatctaaagcatgtatcttcatttgccttttacagcagtttaattctcggaattattgtgatggccgttgggctcccgctgattgaaccaatcgttcatgggctgggggcaacgccagagtccttcggatttacgaaagagtatgtcacgattatgcttatgggttcacccttcgtcatcttattcttcaccctggagaatatcgtgcgctcagaaggttcagcaatgacttctatgaccggtatgattctcagtgttgttataaatattatcctcgatgcactattcatttttgtcttccattggggcgtgattggcgttgcatctgctaccgtcatctccaacttggttgcgagtgcattttacgcttaccatatgagttataagagtcaattcttaaccgtctccctgaaatggttcaaggtgaccaaggacatcctgagcaatgtgttcaaaatcggtgttcccgtctttgttatgagtgtcttcttgggtgcaatgtcgcttattcttaacctttttcttgtcgaatatggggatcaggccgttgcggggtatggaatctcatcacgtttattgcaatttcctgagtttattctgatgggcttgtgcgagggagttgtgccgttgattgccttctcattcacagcgaacaaattacgcatgaaacaaacgattggattcacgatcaaagttattttgggcttagccgtcctgtttggtgttatcgtttatctaatctctgaccacttgattggtttatttacgactgacccgcaattaattgaaatgggtagctacattctgcatgtaaccttcttatccttgtttattacaggaatgacttctttgtttatggggatcttccaagcaacagcccaaggaaccgccgcgtttgttatgtccataattcaagggattacactaattcctatattgtatatcgctaatcaaatgaatggctttcatggagtgatctggtcgctcgttattgcggatgccgtggcgttcctagttggggccattatgttatatgttttgcggaccaaattgcagccggatctggaacatttggcacagtagttaacgtataacacgcaaaaaggcaggataagggcgcaccctgaccctgctctttcatttccaaatgacaattatctatctggtgatacgaagagatcgtaaaccgtctgttataaggaagaagtggtcaacatatgttctatttcatccaaatacccatccactgtaatgcttctcggagcaaacagaaatcgtagtgattgtttccattccgagcctgcaaaagaggttggtaacatcgaatgttctgtattagagaagatttttacatggagcaaggaagatggctgaattcctttacggtatgcttgctctgtatcaacaatgtccacattcacatcatcttctccaagcagaaggagtaccggggttttgaaatgatgcaaatccgccgtggcatctgaagcaaaatttttctttatgaagttccagcgttctttggaaatcagatcatcctctcgagcaatcttggtgtactcttcatatgtgccatgtttctgtaaaatctctttaatctggttttcataatcgacctgattttgaatctcctccgtggaatgaccgtctttcgccatttggctacgtgtgttgtattctccctgttccaaccagtttatcgctggtgataccaagatactgaaggcgagatgttctttcccagcaagcttaggaatcacccagcctgcttggctggcaccccatacgcctattttggaatcatcaatgatggattgttctttcgcccatgcaattgcttgttgtgcctccacaacacgatcatccatgctttgatctagccagtttccctctgaacccccgattccccgtttatctagcgacaaggatgcatacccgatcgatgccagtcgctcccataacggtttgtatccctcaccatgagtagagtctatcggaccgtcaccgtgaataaacagtactagacctagcttgcctgaatggtttctgggtaacgtgagcgtacctgttaacttaccctgtggagattgaatttcaatggtttgttcctccatgtcaaaatcactttgatcgactatgtacagtcctgcaccaagcatcagtaagattgccacaataactgagatgtatcgttttttccaattaaacataactatctcctttgtaaatcatgtaatgccattggttttcgcctaagagcaggccggtcagaaagctgtttgtgctatactgcttgcgaaattgatagcgttcatataactgtatcgcttgatgattctgacttgccacatgcaagctaagagatgacattgatttggattgcaacatatatttctgtgcccattgaagcaactgcgtaccaattcccttgccttggtgctgtggatgtacaaccagatcttccacataacattctcctaatgtaggagtatgcttcagcagatgtaaaccagttattaactgaagcagtttccacatgccaactctattgcactggctccaccaatgaggattggcacgaacgcttgttattgctgctctgttatctgcttccttccatttcaagcacatggtgccaacaatctcctcattttcacgagcaatgactcgaagagtactctgttccatgggaggatgattgagcaactgttcaaatgcgtaagccagatcagttatggacaatgaagtgattttttgaaatttgtgtccaaaaccataagccatgagttcagcaacagcttgatgaaactggggacaaacgggttctatctgaatggaagttttcactgtgtgcctcccctaatcgatcatttgtaacaacagctcataatgaagcttttctggtgtgaataaagataaataagatttttctaccataataagtggaccgtgatagggatagccctgatcttctgcgtaagcataaaattcgttgatatgttctttgagttcagcttcaatttgtacatatacatgacgagaaaggtattttcctctaggcaaaactaaatcgttcgctccctccttttgtgtataaattcctacggtgtccgtctcatcgtacgcataatggatgtcggcttcaaataaattgggaatgttttctttaagttggatcagttgccttgcttgcaagtactcttgcgcttccatatggaaccacagggataagtgaatctcctcacgagtatcaatataataagtcacttgatcctcatcacgtggaatatgatctttctcctgcagcaacttgctgataaggtgctttgtttgctgaagctgagtgatggctgcttccgtgtctgctaacgcttggcgaaataatgatgtgatttgaacggttgtcaggttactcaaacattccttgatcatttgaacagacagtcccattttgcgaagcaataaaatatgagatagacggtaaatttcatctaccccatacatcctgtattggttttctgctatataagcagggtgtaacacccctttttcttcgaagtatcgaatttgatgtacagagactttcatcagctttgccagctcactaatcgtaatttcatcactcaaccaattcaccacctttgctgtttttcacattacaagcataaaccttaggtctgacctaaggtcaagtctttattttagcctctcctgataacaaaaaaccacggcaccagattcggtaccgcagtttattaatcaatcatcctattggatttgtttcatgtaagatttgaattcctcggcaatttctttgtatttcgtatgatgcaggtaatgtgaaccttccattgggatcattttgccctgcgcggattgtttggcttgtgcttcatgtaacggaatccactgcgggtttttctcgttattggattgaacaaagagaagcactggcagatcactaggatacgtgagtttttctccatttttgaaattggaacccagatgtttaagctcatttactaatgtcggatttgtcgagacttgattcgaaatcaacttcatctgttctttggtatgttcatcatagtcaagtgatgcatatgaatcaccactcactttattgagtactctcattaagcctgatttttgaaagaatttcattaagttcaaaggtaatttaacatccatgccaggttgattcggaacactgctatcgatcccgacaaaagcagagacttcatccggatacgtgttcacataagtcgccgcgtacagtcccgtgatcgaatgccccatcagaatataacgatctataccgagctgctgtacagcttcatgaatttcactaacaatattctcggtggttctctccgtttcggtttggtcacttaacccataaccgaaaggctcaatcgccacaactttgtaatcggaagttaattcatcgattaacaatttgaaatcaagtactggtgacggtgttccttgtccgggaagtaacacgatggtttgttcgccgctaccttgaatggatacattcatattcttcccatcaacattgacatattggccgtacgattcgattttctttttctctgccccattacttatcgtatgaacgacaaacgtgatgcccatgaacagcaccagcgcgccgacaataccacctattattttcaaccataagtaccgttttttacggcccttagtccccgttgttgttacatccacttcttctgccatttccatcttctcctgtcgtttatatctgtagagccgctcttgcgacataggtatagtgtaaccatggaagatgtccccttcgtgacgggaatatgaacggagtatgaactacaaaaaaaagagaactgcttgttgagagcagttctccataggataagacagttttagtggtccaggaacacaagctgaatgaagaacaataccgcaaaaatgtagaagattggatgaacatctttaccttttccacgaagcagcttgagtaccggataaaagatgaaacctacgccgatgcctgtcgcaatactatgcgtcaatggagtaaggatgataatcaggaaggcaggaaatgcttcttcgagatcatcccatttgattttgctgataacattaatcataaagtatccaacaataatcagtgccggagaagtgatcgccgggatacttgatattacacttacgatcggtgtgaagaacaacgtcagcgcaagcagcacacttaccgttaccgctgtcagtcccgttcttcctcctgcagctacccctgtgctggattcgatgtaagccgatgttggacttgttccgagcaaagcacctgaggttgttcctacggcatctgccaataatgcgccacgcgagcgtgggaatttaccatccttaagcaatcctgcttgttcagcaacgccgagcatcgtgcccgtcgtatcaaacagcgtgatcaacaagaaggtaaatatgattgtatataaaccattcgagaatacacctgccagatcaagttgcaaagccgttgacgcgaggccttgcggcatggatacaatcgattccggcatttggaatagtcccatgatccaggcaagtatcgctgttaccaccattccgatgaacaggtaacctttcacattataagccatcagcacaacggtaataatcaatccgataatggtcagataagccattggctcagccaagtttccgatcgtaatcaaattcgattctgaatcggcaataatcccggcattttgcaaacctaccgttgtaataaacaatccgatccctgcggttatggcatgttttaagctagcaggaattgcatctagcaacatgtaacggaatgaagtcagtgataaaataataaacaaaatccctgctataaatacggctcccagtgcaacctgccaagatacgccatacccggcaactacgctataggcaaagaatgcattcaggcccatacccggcgcaatgacgattggataattggaccatattcccataatcagagttcccacaatacttgccagtaccgttgctatgaatactccgttaaagtccatgcctgtgctgctgagtattcctgggtttacgataactatgtataccattgtgaaaaatgttgtaacccctgcgataatttctgtggggatggtcgtgcctcgttctttaagtttgaaccatttgtccatggtaaagccagcctccaactttcaaattatactccaaagctaaaaacaaaaaatcctaatcttcatataggattgtaatattcgcgctcctatattcgttgttaggatttaaagattcaacagctaagctctaaactaaacataaagatactcatatctgttttcaacctgaagtccatttcgtattctaattaaaattacatgcaatgtcaatgaattaacgatttgttcacagttatttacgaactatacagacattatatcttgtgttcattcgtttttagaatagagtatgtacgtatcgctcaatgtctgcaatatatgaagaaaagactgccagcaatgtttactgacagtctcttgcttaattcgtagtaggtttctcttcatattcgctggataattctttaagcgatttgattttgccatggggatgctgttcttgctttcgtgacttccaggcagcttcttttcttttcttctggtcagccatacaagatatcctcctctggaaactgagatgtatactacttctttatgatgtcatttctggacaactttattctgcatgcataggtaataagagaattaggcaagcatataagacaatatatagagaattcagaagttaattggcaggacccaaattaatcaagctgacctcggataatgagacggttgtgttgccatcttgctcaccatcaatgttacccagatcaaatgaaattcgagtattcgcatagctgtcttctgttgcatcaaatgtaaacgtgaactcctgttcttctggggtcaaatcaactcgtgccccaaagaacccatgccattcatagttggcagctgcatcgacccatccaatccccaaacccaatttcctggacttctccgctttggctttaaacgttaatttatatttaaaaccttgctgtatgccaaatccttcattgatgacttgacgatcccatggatgctggcctgcatgaccaatcttggcttgaagctgttgattgctaacttgcatctcaaggtccgctgcattaccgtccgcatgggtaaaccaaccttccttacctttggagaagtctccattaggaataagattaacatgagcaggctgccctccttgatctgcattcggattaacttcatataattggacgttattgatgtgaatcgagtgttcacctgtagagagcggatatcctaatccaaatgcaagcatggctgccgaatcggaggtatcccccatagtgaaggtgtaagtatacgacttttgatccgcagttaattccacttcttcttcaaaatacttcacaaaatcgcctgcattctgagagagaaccgcttgcatggatttaggacttgaagcagatgcctcgaaggtaagtcggtacgttttgtttgcatccagtttgatctgaccttgttgcaacaaagcatcccaccaatgttcacttgtaccaggcagtttaaccgttaatccttcgccctcgtcatgagaggctgtcagatcattaggagttagctcccaatgattcagatcagctgttagctcactgttctgaattttgttttgtgaaatatccacccaacgtgtattataatctgctccttcaaaattcacataatagggtttgcctgctgtcaagttgacccctggaaaatacaccgtttgatatgcttgccatccacccgtgtctccgagactcaggtctgattgtgcaacggttgtaccttgttcatcctgaatgctgaactgaaccttggaatcactttttccactggccattcgggcagacagaacatatactccgtcgtgagctacatcgattttatattgcagcagatctccctgatccatgtaactgacatgttttcctccttctacggagtcctccagttgtaagccctgcatcatccaggcttcggttgcaggaacatgtgcgtagccattcactgacagaggtttgccgcgtttcgtcagacgaacattgtccacatataccttacctttagaactgccgaataacagttttagctcggattgtgcgattgatgctccatctccaatgatgatttctccggtgaatgttttcatttcttggttcaaggagaggttttgtccttgatgaacctgtaccgtatgcccattactgctgacaacatcaatgtcgatacttcgctgtgtgtctgccttggcatctaaggagaaaccatacgttgtattcgcttccagtttcaaatccggttggttcaccgaaacttgttgtgggtcattattcgtttgagtaacatcaacaaccagctgacgctccataattgggaatttcgaaaagttatttacacttatattggctgccgcactgtcctgaatgctgcttgaccagaatcccagacgctccttgccttgatcgaatgtgccattgtaaataaagttgccatcaggtagcgcgtttcgttcgacagttaacggatcagcttcacccacctcgatcagcctgacattggcaaaccaaacggttgtatcatccaaccccagattaaattcgaatctggcattgttatccgtgccatcccgcatattgaaggtatagtcataggattgccaatctgtcgtgagtgcaaaggtgttatcacccgaataattcgtccagcttttttcgaattggttcagtttggacatgattgtgcggttagcagatgctttcgcatcaaattgtatcttgtactttttgtttttcttgatgtacatcggcatctgagtgagttgaaccgagtagttttcagtacccgatgcatcaatggtaacttctgctgctttccctttctgctcatccgttacaactttgacactgccagctccatcagcatttgtgatgaatttccactgaagaggcactccattgtcttcagacccttccgcaaaacgatcattgtatatttgattgccatcggtttgtgggtcacgctgttgcgcaggctcgatgggatttgttgttacatcaggccatgtgtctagatttttgtaagaatatactcgcacaaagtcaacattcatcttttcggaagtgaagttgctttcaggtgcccccggccagtctcctccaactgccagattcagaatcagatagaatggacgatcaaatggtgcagggaacgtataatactcgggttggccggcggccttcgtttgccagttggtcacttcatgatgcagctttccatccacatagaaacgaatcatacccggcaaccattccacctggaaatcgtgataatcgtcagcgaaagtttctcccttcggaagagtaaggcttccctgatcatgtccatgggaaccgtcaggcttcacactgtcataatgcaatgtgctatataccttgttattactctctttgccaccaattagctccataatatcgatttctccagaggcaggccatccaccataatgtgcttcatctgttggcatcatccatatggcaggccacatgcctttatcaataggaagcttcgcacgtacaactactttaccgtaggtccagtcgccttttcccatggagatcagtttgccagagctgtaatctttaccgtttttcggccccttttttgcttcaatctgcaacacgcttcgattctgatcttttgtaatgcgagtgttatccgggctgtaatattgcatttcattgttataaacgagtcctgtatcctgcacggtccatttggaagaatcaatcgcaggcccgttaaactcatcgttccagaccagctcccattgatcatgcggaattgttgttgctggaaccggtttttcgcccgccggattgcttggtgttgatggtgtagacggtgattgtccgtctggagaagatggtgtgggtatgcttgtcacatttgttgaaccatcaggctgcgatgaaacaggttgttgggcttcacccaccatggatgtgcgcaatccttgttttactttctctccgttgatcacaacatcatcggcatctacactcaatttttggatcgtacctttggtatccattcgagtctgactcgcttctgcatgaatattcatggaatcaatcaggctgtttgaagagatctccagaatggatctctgcattacatgcatctcctgaatgttactttcttccgtaatggcaactctgacgggttccccacgtttgtcaacgactactcgattcagcttggagttgttaatgttgatggaatggctgcctccgcctttaatgatgacacttcctgtaaccgttacgccctgaagaacaacagatccctcgccaatgccttctgccagcagcagatttccattaacaaccatatttttcaacgtgacatccgttgatttaataatcaagttgccatctactcgggactcatatataccaggagcacttttcacatcagcaatcatcgccgacaacattgttgccgtctccgctcgtgtaatcggggctttgggatttaatttgccttggaaacctttaagaatattttcgttcaccagataggtaagcgctttctttgcataactagaaatatcatctgcatcctcaaatttcaattgttcactatcttcatttgtagccgctgaaagttgaaaagctcgatctaccataaccgctgcatcttggcgtgtaatcggttgttgtggtgacagatgttcacggtctgtcccttcgatgatgccagaaccattcgctcgtaccatcacgtcatagtaccaatcgtctgaagtcatatccgcatatgaaccagtcgccacattaccggtgaaaccaaaggcccgatccagaatcatgacgaattcagctcggctaatgacctgactgggcttgaacgtaccgtccgtataacctttcaataaattcaagtcttgcaaacgtgtaactgcagattgtgaccaatgccacgtcaggtctgtatagggaacagagaagtgcaggcttttcgcctgcacatttcccacctccgcttgactctgtacactttctgctccagcagttgctggataaacgagagaagccattaaactccatgccaccatacatgccagtccttttctcatccttcttcctccctcagctcagttatccttgcatttgcatagcctattccttgactgctccaataacgatccccttaacgaagaatcgttgtaaaaacgggtataccatcaggatcggaagcgcgccgataaagatctgtgctgcgcgtacggttcgctgcgagatattctccaacatggaaggatcgacgttgattttgctgagatcttgctgaacaataatggtctgtaatagagaagcaagtggataatttttaatatcagacatatagatcatgccgtcgaaccaggagttccactgatacaccatcgtaaataaggacaaggttgcgatagctggaagtgaaagcggtacgtagaccagaatcaacgttttgatatgacctgctccatccaaataagctgcttcctcaagttctttgggcagaccgcggaagaagttcatcatgagaataacgttccacacggacagtgcgccaggcaggataagcgcccagattgtattcatcaagccaagcttctggatcagaatgtaacttggaatcaaaccgccgctgaacaaaatggtaaatacgaaaaaccacgtatataaggagcgacctttaaaactgatatcttccttcgacaacggaaatgcggttaagagcatgatgaccataccaatgatcgtcgcaattacagtccgtttaagtgatacgatcaaggagttgatgaagttcgaattcccgaatgttttcacatatgcgtcggttgtgaacccgatgggccagaaggtaaccaggttagatgatgctggcgccatactgctgaatgaaacagccaatatatgaataattggtaaaatgcagagtatcgataatatcccaagaaaagtatagttagcgatgctgaatatgcggtatccttttgttttataatacaagcccttttctcctctctagaaaactcgataattagctagtttgtaagccattctgtaagatataacaatcaaaatggtagcaaccacagatttgaacaaccctactgctgtggcaaaactcatcttcccgttcagaatcccgagtcgatatacaaaggtgtcaatgatgtcgcctttgtcatacacaagcggattgtacaagttgaatacctgatcaaaaccggcgttcaggatattgccgatagagagtgtcatcagtacgattgtaatcggcattaatgccggaatcgtaatgtgcagcgtctgtttaaatcggttggccccatccacctcggcagcctcgtagagtgcaggattaattcctgagagagaagccagaaatacgatcgtaccaaaaccaaattctttccacacatcactgaggatcagcgttatccggaaccatgtaccgtctcccaggaagaagatcggttctcctccaaaggctacgacaagctggttgaccatgcccccctgaggagacaggatatcgagcagaataccaccgagaataacccatgataggaaatgcggtagatacacaagcgtttgacttactctcttgaatgccgtcaagcgcacttcattgagcaaaatggcaaacaggaatggagcgaacagtcctgcgatgattttgaaaaatgcaatgaccagcgtattccagatcacctgacctacgtccggatataaaaataaatatcggaaattgtcccaacccacccatttggattcagaaaatcccaagtatggtttgaaatcctgaaaagcaattacaatgccacccatcggtatgtactgaaacaccagtgccagcaatacagctggaatgagcatcatatgcaaggtccagttccgttgcatattccagcgctgtttaaccctggtggagcgccgtttatgcggcgtttctaacgtatgttccttcactcctgcatcccccatgttctaaattttgtattttacaagtcatcgtgaacttgtatattaaaattatagcaatggaaatttgtgatctatatcctaatattgcaacaacgatatcaatattttaataagattaaggaggttggactttgttcacacgcttgaatgtctttaccaaaattacactgttgtttgtgatgctgcttattctggtgctgtttctctatacatactcgaaccgggaaagcgtgcgtgttatcgaacacgagattcagaacaatacgatgaatcatctctcgacatttgctgattcagtagaatccaacatttaccaactgtcattgtatgggatgtctattgggcaagattcgagtattcaggaatatcaacgtcccgactacaaggacattccctatgaacgtgtgaaagttggaagtgccattctggagaaaatgaatctgtacaacgcagcaagcaaatggcattcgaccatcacactatacttcccaaggatgcaaaaagtgatatcaacggattattatgcttacattccgtacagggatgatgaatttaaggagcctctctcgcaatcctggacctatgctgacaatcagtttatctggtacactaccgatccaacgacagcgatggcgagacctggcaaagccagattgattaccaaaatcagttttccagttcatcacttaactgcacttcttaatcaaaacaagttaaataataaaggcgacccgttcatgttccatcccgattatggattaatcagcaatagttctggaaaggagaccttgaacgcaattctgccttccctgaaagaagcaaaactgcaggccagcggtggcttcagtacaacgttgaacaaaacggaatattacgtctcctacattcaatccaagagcctcggctggtattatattgactatgtgcctatgcagcaaattttgaaaccgattacgagtagccggaatctcttttacgcttcaattgccgttctgatcgtgatgagcgttgttgtattatatacactctaccgaagtgtgcagcttccacttttacagttggttaaggggacaaatcgcttgtccaccggggacttttccgttcggcttcatcattctgcacgcaatgagttcagcctgttatttgcacgtttcaacatcatggctcaacgaattcaagaattaatcgagaatgtatatgaggagaaattaagaagtcgggaagccacgctcaaacagttgcaatcgcagattaatccgcattttctatataactgtctgttctatatcaagaacatggcccgaatgaaaaatgaaaaggccgtagtagccatggcactgaatctgggagagtattaccgatacataaccaggtccgaaaaggatcaagccacgcttcgtgaagagctgacaatggtcaaaaattatttggaaatccagtcacttcgtctggaacgaatgcattttacaatcgacgtgccccatgatattttagataaaacagttcccagactaaccctccagcctattattgagaacgctattattcatggtctggagcccaaatcggtagatggtgagattaaaatctatgcggactgcgaggatgatgtgtacacaattatcgtggaggacagcgggcttggcatgtctgagaaacaacttgatcatctgagagataatcttcttaaaccgctggatgagaatatgggatgtggtacatggaatgtccatcagcgtttatcttttctgtacggtgaaggatctggactatcttatgatcattcttcaatgggtgggattaaagttaacatcacgtggcacgacaatacagacaagtaggtgaacgacccatgctgcaaatattattagttgacgatgaacgttccgtcgtggaaacgctggcagagaccattccgtgggaaagctgcgggatcggtacagttcatgaagcattatccggtgcagtggcgctggaaattatggacaaccacgacattgacattgtaattacggatatacgtatgcccgaaatgtcaggcattgcactgattacagcgattcatgaaaagtggcctcatgtgcagacaattctcttatcaggtcacgccgactttgaatatgcgaaacaggccattgcgcaggaaagctttgattacttgctgaaacctgttagcgatgaagatctgatcgaatccgtgcaacgtcttgttcatcgaattaaagaaaagtgggaaaccgcagcatctcatcaaagagccttacacgcctttcaggatcatctgccattgcttcaatccacgatgctgcatgagttgctgactggaaaagtctatgatcagaagacgctggcagacaagcttgatctgctggagcttccctactccgtaggagaagatctcggcatgctgattattcgtatggagaaacatctatccgatatggcacacggcgacctggccctaatggaatatgcgatatgtaatatcataagtgaagtgatgcataatcattttcatatctggcacacacgagacgttcatgattacattgttgttctggtaagcatgaaacattccacaacgatgagttatagcaggagtgagacgcctcagacattgcttgagcagtatgctgcccagattcaaaccaatgttcagttatacctgaaaggtgcaatctccatttccgtctccagttggggcaagtttccccacgaaattggagaactctatgagcgaacggttatgtccatgcgtaaacggatgggtcaggtgcaaggtttgtttgtcaccgcttccgatgaaacggatgccaatcttctacatacgatcaggtcgctgtatcagccgccaacgttgattagcctgctcgaagctggtcgctttgaggatgtggaacagaaaatcgagcacatttttgaggaactgctgcattccaatgaacatcatgatattgccgagtcaacctttgaggtgtattttgctattgcgggcgcgtttgcgtacatcattcataaaaatggcaaacaaatctcttctttgattccagcagagtcctatcgttactttcaagctcccagctattccactgcgcagcagctacaggactggtccgtccgtacacttcattacatacgagatgatgctgaacaagagcttagagacaatcacagcaccattgtgcgcagcgtcaaaagttttgtcgaccttcatctggctggtgatgtatcactgcctgcaattgctgaccatgtgcatctgcacccagtgtacttgtccaaggtatacaaggcggagacaggtgaagcacttactgcctatgtgtatcggttaagaatggagaaagcagcctatcatttgcgaacatcaactgccaaagtgtttgagattgcagaacttgtcggttacaacaataccgcatatttcatccgagttttcaagaaattttatgatcttacaccgcaggaatatcgggaaaatctgccggtttaagagagtacacagaccagacttgacgttctagtaatctctccggtttgcccttctccatatcaaatacaaaaaggcattgccggagattttctcctgcaatgcctttttggtgcttatgtggccgggatgaatcatttcagccagccctttgtcatcctattttccgcttttcacggaatcataccactcgttaacttctttcgtaatctgatctccacctgaagacttccacttctcaacaaatgagtcgaacgcgtccacagaggttttgccatacacaatttgagagaaggtgtctttctccatctttgtcaaaatgtcattgttcatctgcatcgtcattgaaggtgcaccggtaaacatttgattgaacacgatatccttttgatccaaaacaatcttggctgcatcaagcataggtactggtacacctgatttgatttttttctcaaacggtgtagttgcttcttcaccgcttgccagcttggcaagtgttgtcatgcttagatttggtattctcgctccatcaaaagtcaacgtgtacttctcgggagcataaccacccgtaagacttgcatcggttgatggtttcccatctaccataacccaatcgtatccttccgcaaatccatgctcaaattcatcgccctctttaggattcgcatagtgatcaaagagatagttctgataggtgaaaaaggcttccggatttttcatgtctttgttaattagaactacgccatttccgttcgacgtaccatgtcttcctgcttgaccgtttggaccggaaggaattggatacgctttgtattcagcctcaggattgtttttcttcacatcctccagcggccaggatggcatccagtgtggacccaccacaatacctgcttttccggcagtaaattcttcagctgcttttgtctcgtcatacacgccggcttcttccgggatataccctttgctcatccagctctgtaatttggccaaagcctgtttcgcaccaggtgtaacggaaccgtattcaagttttccgtccgccgtcagattccattggtttggcattgtaccataagcgccaaatacccacccagcttcagacatccatgtgttcagccagttcttgaagccaatggtgagtccgtaagtgtcctgcttcccattgccatccggatcttgattcgtaaacgtttccataatgacttcaagatcatctatagttttaggtgcttccagattgaatttcttcatccagtcttcacggatccacatgacaggatcaccattataggaatagtccagaatcggaataccgatctttttgccatcttgcatgtatggataccatacggaaggatcttcgtttacggctgctttccatgtgtcgctggcatatttgtcaaacaactcgcccgcatcgacaaattttccggactcaatcaattcacgcaccagattgaattcgccgcgatacgaaataatgtccggcatgtccgcattggaagcaagcgatagacgcagttttgtctcaaatgcattattggtggatggagatatccactggtttttcaactcaattccgagtttctccttggcccattttgtatggacgttgttatcctgatcctcgcctgacttaaacttcacgtctggaccccatggtcgtaaatacgtaatggatactggtggatcatacttcccatttttgagctccaacgttgtcgcaggtgtactcgattctgttttcttatcgctcccgttactacacccactcaaggctgcagatagggccaatacaccgatcatgaccaaactgcctactcgtctctttttacttgtgtccaacttcgttcccccagtctatgtaatgttgcttacaagttaatcataatgaatttttgatatttatgcccatactaatattgcaacatttattgcattaatttaggatattggatattgaatacatatattgaataaatacaatgccagaatatagaaaaaagcagccgctaacggctgcttcagtctgcttaattactcgtatatttgacccaatcgtactctgcatagagcggattagccccattataaggaccgagccagctatctactcctgttccattccagaggttcatcatgatttttccgggtgttttaggaatattgctggttgccgtatgtttcaatacaccatcaacataccatttgatatgtcccggctgccagtcaaatgcgtacgtatggaaaccctgggatgcatcaaaccctagattgataatcttctcatgattaccaaccccattggtataataattaaactgcactttggttgtgtcttttcctaaaaattcgatatcaatctcatcccattgggtgccatgtgcagggcctgtgtatgtgaaaaatgaggaaactacacctgtgttcttggcaggtttcatactgacttcatacaagccgtacccatacgtattcgtggtacgatactctccgcaatcaaacttgttctgtgcagagctggtcaaaccaagcttaagcttgccgtcacttgtaaaattaacattgttagccctccacgtacagttaaacatgttcccattggaatacccatccgctttttgccacgtacttgcgttaaaataggttagaggttcccagaacacataacccgcgaaagcgcttaccgaaaaaaacaaagagatgacaccagttaccgccaaagtataccaagacttcctcttcatcatacacctccatgaatgattccaacatgtataagcagcgcaataatagataacgcttacatggttggtatttccattttatctggaagtatagtggtacactatagcaaacttcaaagcagagatattcaatttttaagatcctcgttcttgtatctaatcatgtcatgtcaagactaagccagtttcatacacgtaagatggattgaatgaagcgcctgcccttcagcatagaaggaatcaggcgctccatgaaaaccatttttacatatatctcaacatgtttgttaatttatccaccctaaaagggttttatttcgcaccagcttgtaccaaaatgtcttcaatttctttaaaaccattattcttcgcatgactgagcggtgatacgccatcacgatccggtatgttcacgtctgctccatgatcaatgagtaattgtatcgtctcctgctgccgagcattgccatcgttaagaatgatcgcttcgagtagtgctgtccatcccaattgattcacatggtccacatccaccgaagtttgagtgagtagttcttgcactacatccacatatccatgctccgaagctggaataagtgctgtccctccatatcgatttgttatcgctgggtccgctcccgcctcgattgtcagcttcaaaatatccaagtatccttcagcaccagcatacagaaacggggtatttttcatatcgtcctgtatattcacatctgcccccgcttcaattaacactttagccgatgttagatcattattgtaagttgcaatcatggtagcggttcgtccactctgatcttgagcattgatattggcacctgcttgaatcattttttcgatgcgttcagtatcgctgtcctctactgccttgaacagctgttcatctgctgaagtaatggccttttcctccacgttagagtcgtttctcatttcaggcacgcaaccttgaacgatcaacatactgcttatcaggacaacgataatcagcgttttactcatactgcctcctttactccagtgtcaaggtgaccgaagaagcgatactccaatccccaactgggtttattgtatacgtagtacccggagtcaacttcccatcatttgttatgtcgaatacacccgtcgcaccttttcgacttgaatatttataagtggccgtcagaacatccccgcttggtgaagttaacgttacacttcgaccagagaacagttcatccccagggtcctggtcaagtgtaacttcaatggaggtttcgctcactgcttgagcacttgcaaccactagtggatcaaacgatttcgccgtaaatgaagcattttcgatgttggcccaatccgaagaaaccgtatatgtgacgcctgatttcaacgtttgtccttcaggcaaacggaacttcggttcttgtttgccatctgtggattgcgtgaatggaacatatctggcaacgataggctcgccaccttctggcgtaattacaacttgtcttgcctgcatggaggagataacttgatatgttttgcctcctgcttgctcttgatcatttaggacaaatgcattagctcctcgaccaccactgtaagccgaaatgatgtaaccataatccactacaccattcacttgcagtgcttcaatctcgaatgtatcattcgttacttgactaactgttgtcatgtttattttcgtaccactgccttcaaaggaaccagcgtcttggcctttgtaagtcaggttgtacacttcaccagcatcttgtacggacgttggaacgatgtaagtcgcaattgaccctgttttcaaacggggcatattagttaacgtcagctcaccactaaacgcaaaatccgtttgtgccttggcaaaagcctcatccgccgctgtcagcggtttgtcaaaagttacaattaacgtaatggcattcagtgatctaacgctcttgatttgagcttgctccgaaggaatagcttggtgtgcagtttgcaacagcactgctgtttcgccgcgcgttgctgtaccattctcgaagtagaactcgctcatccaatggtgaacggactttacatcacgttgcatcgctttggatacgacctgttcgagttcagcatccgacacttgagtttgcggattgaattgtccatcgttagcctgcatgatgccaagttcaacaagctttgacgcatatggcgcataccatgcattcggattcacatccgtcaattctacggtttctcccgtcttgctctccaaattaaacgttttgaaaaccaatgaagctaactccgcacgggtaattgctcgatgttcacccatagattgatctgcatacccgttcatgatccccaagctattcagatccttgatagcagcttcaatctgttgttgggtaagctgtgtggttgttgccgcaatgttagtaacgtatgtagctgcatgtacttgattcgcagttaacgggaacactgctgtacctaatgcagttatggttagaaatgtagcgattttgcgggttgtagaattcatggttgaattcctcctctataggttgtagttgcctgtatctatagaatagaggacaaaaagaaactcccaaggctaaagttattaacaaaatataaactggctctaaattttcacgaaacttatgcagtaaaccggtagcctgcaccccagacggtttcaatatactccggatttttggggtctgtctccagcttgccgcgcagtttgcgaatatggacagtaaccgttgcaatgtctccggtggaatccatgccccagatccgctcgaacagatctgatttgctgaatacacggttgggatgactcgcaagaaatacaagtaactcgaactccttcgttgtaatcgccacctcttctccattaacaaaaacgcggcgtgatcctttatcaatgtgaagcccgcgaatgtggatttcatcctgctcagctggtttgtttttgccaagtagtctctcgtatcgggtcaaatgagcctttgctcgtgcaaccaactcacttgggctaaacggttttgtaataaaatcatccactcccagattaaatgtccggatcttatcgatttcttccttttttgcggaaacgacaaggatgggcacctcttttacctcgcgaatgcgcctgcaacattcgaatccgtcaagtcccggaagcatcagatcaacaatgatcaaattatagtccccctccagtgcctgcttcagaccttcatctccagtatggcagagattcacggaaaatccgttgagctcaaaataatcccgttccagttccgcaatcgttgtttcgtcttcaatgatcaaaatgtttgccattactcattagttcctctcttcattcagccgtttcagcttgatatatatgctcgtgccatcattgggctggctttctgcccagataaagcccccatgtccatcaatgatttggcgggcaattgctagcccgagcccacttccgcccgttgaggaattgcgggattgttctgcacgatagaagcgttcaaatatataaggcagtgcctcttcaggtattcccctgccattatctttaaatgccatcgtaatccagttctcatcagcttgaagtgtgatctcgaatcgtttatgttcattctccatgtatttgagtgcattatccaccacattaacaacggtacgttttaacttctccggatccacagcagccatagcgggaccagacacctggttattccaacccagggcaacacctttatcctccagatcatatctcagctcttctatgctatcttcaaggaaatcagcgagatcaactgtcttgaacaggaaaggttcttggttcaagtcgagcttggaatacaaaaacagttcatccaccagcttatccatgctaactgctttggagtgaatgatattaacataactctccattttctccggagtattagccacgccgtcacgaataccctcaatgtaacctttgatattggtaatcggcgtacggagatcatgcgaaatgttggagataagctctttgcggttcacttcgtcctgctgacgtaacgcataggagagctgtaattgattccgcatgctctcaaacgcttcgctaagttgaccaacctcgtcattggagtttagctgaagtttaaaggatagattgccatccttaatatgttcggctgaacttcgtagttgattcaatggtttaatgaagctgcgcgtgatccagcggaacaagagcagatttgcaatgatgaggacgccaataagcaggaatgacatcacaggcagcaacttgcgagtaagctccgcaaaggggcttctctcgcgaatgacaaagatactcccccgttccccatctgaatattgaaaatcaaattttgcatacgcgtaaaatcgctcaccaatattgaaggtgctccgaatctgataattgttaagatcataggcaggcagtgcttgcttcagttctggctggttgaaggtcagtgattcgaagatctgactattctctcgtctgatgtagagccctgacttctcagctcgaagcttcatatcatattcacgcagcaaaaccttgttctgcaggtcatcagggtcatttttggccagaaacttcatctcttgaaagatcgattctccctgttcagtcagggggttgatctgataatgtaccttgtatatatcacggaaactctgtagatcccctgtggccgcaatcgtatacagacttgccgtaagcaggatgaacagtagacttataacaagcatgcccgtaaaggacagcagcatttttattcgaattgacatgggttccccttctcaagcaaacaattggattagttagtgcacatgttaacacaagatggattctattgcccatatgtataaaagagctttctttttcattatatatgttgacagtgataatcgttatcaataatgttggagtaaggtgcacaacgatttatcttagaatgactggcaaacacttttgaaatgaggtacgtaatgtgaaagtagacgttaatcagttagcagcgcattttgcacacattccttttcaagtcgaaggagtatatcgatatgctagaaatccaggggttccccaggctgactataccgattcttttcctggatttgtatttcctcttacaggaaaaatacaatttcaatttgatggtacaccctatattttttcaccaggaaaagttttacatgggggcgcgaaaatgaaactggatcaaaccgtgtttcatagaacggactgggaatatatcctcgttttataccggatatgtagttcggacctcgaagagacaagcttttcccatcagcattttgaattatcaacgggtcaatccccacgtctgatcgaattaatcacgcgtctttggcatgtgtataaccagcgtggaggtatttcaaagtttcagaccgaaatgctgtttcgcgatgtactgaatgagaccttaatatgtgttgatcataggcaaaatagttgtgaatcagatgttttattcgaacgggtctctacctatatccaagaatactatgatcaaagtctgactgtcgcatcgcttgcagaacaaaataatgttaatcgaaatcgactttcctacgtgtttagaagacatgcaggtatgggtccagcagaatatgtattgaaatatcgtataaatatggcacaacaaatgttattggcaagtgatgcgtctgtacaacagattgccgagaccgttggcattgctgaccccttttattttagcagagtgtttaagaaacaatatggtatttctcctacggagtatcgtctgaagttcatcaataatccatcctgatttcaataggcatccatgttatacaaaagcttagattagtatactgaacatataggattaatacacaggaggaatgacgatgcactatcaagcaattaaattaaatgaggaattttcgaaattaaacgatctttggtctccgaaactcattggtgaaatgaatgactatcaatttaagatcgttaagattgctggagattttgagtggcatgttcatgaggagactgacaagttattttttgtgctcgaaggggaaatgataattgattttcgtgatgggcaagtgaagatttccaagggcgagatgtatattgtccctaagggagtcgagatcaaaccttccgccgaaaaggaatgtcatatcatgttgatggagcctggaagcgaagtgaacactggcgggactaaggccgaataagcgtcagttattggaaccaggatgtcaatttgcaatatcagagagccgataaccgcgtaataggggttatcggctctgcgtctgtacggctagctcttcgacatacattaatcagcaaactctcggttatgtcacttgttgctggtcttcctgatcaattccacaccatcgtatgccagactttccacacttgctgccttctgcagtatgtaatgatcaaaaaagttcttcgcatagtctgtaacaatatttcgcatctccataacatcccgttcacctctgagttcctcattaacactggtaaacacgatgtcacagtaatccaaatgtgcaacacgatcaactgagaaataataggtttccatgctattgttagcgccaataatcgcattcatattatagttaggttcacaaaacaggaacaagaaaggtttcttaagatcgctgtcaagaagtccaaacgcaccgctatccaaaccaatcccgcaggtgaaccggtcatcatcacggcaaaccatcgccgtcgtaggccctccataggaatgtccgactatacccatgccgatgtcaagcaacaatctgcccttaaagatggaattcagctctccagagtccagtttgtaaagataatcggctacataccttacatcttctgcctgtgattcactatactctgttatcttggaaagtatcggcagtgcaagcacgttacggcacatctcaatggcagtttcatcgtcaggccgcatctccatcttaccagataacgccagcatctccggatcttcaccaaaggctgtaatgacatccgaaaagtcctttgatacattaaacaggcgcccatctttacgtttatacatcgtgctattctgatggccgatgcttaccacaacataccccatgcttgccaagtctgtacagagcactgtcccccattctggagatccgcccccgccgcaaacatagaataacactggatagcgcttttccttcccggaaagagcaaggtcgtcgtaacactgggtcttgatatctatagagaaaacatccttcaacgcggtgacaagtggctgctcattaaacatctcgtagacttcaggaaacatgtacgttgatgtagtcttaccttcgctactgtcagacggatagtacacaaaagcggtcagttctcttttggagtaatctgatgccgtgtactcaaaatccatctgggttcgaccgacagtatagcccccaattggttctggaaatgcgtcataggttttcattttctttcccccttaagatcgctaaccatttcagaatatttatgatcttcaagcagcccatgacccataaattcagcaaagtacttgctgatcttatgttgcagctcagagtccttaatatcgaattccctaaaaaacaagattaaattaagctgcattgactcaaacataaaagagatcagatcgtcgtcaacatccggtcggagatatccatcaaccctcattcggcgtaaaatgtccttgatcatggggaatgactcgccctttaacacattcacatatactttcagcaaaatgtcctcaggaatatatgaaaatgttttagtcagtttgatttccaactcattcagtggctcggtcaccatgccattaacgttaccaaataagccagtaaggaaatagctgtaaagggaatcttcattactgttactgaagtatgcagctcttttctgggtcacattacgtattaagtgacaataaaggtcatctttgtcttcaaaataccgataaaatgttccagggtgcatggacaaactatccaaaaccatcttcatagttatatcctcgtaaagattatcaacaaaaagatgcatagcgctattcgatatttcctcgcgccttgcttcgtctaaacgaaagaaagtattttttggcataaattactccttaatgtatagtgtgaactgattcacactataccgataatacattcacgagtcaagtcgtattaaaatagagtgttcacttcaatctcgctatcattcaggctgaccgggaacagctttagacaggaatttggtccctgaaaacaaaaaaaagccgctaaaatagcgacttttaatggtactatgtttttgtccttggtttcattacaacccgagatcatcagcgagtccttcaacacctgtgaagatggaatccccgtaaccccagaagttgttgaaatcaataatgtagatttttttgtttttaactgcgttaatgttttgtacctgcttgttggcaagcagcttttcaatcgtttcttctggatcaatgccaccagcatacctcgaaataatcatcgcatccggattaatctcgattaacttctccagactgagtgtgccggtttcattaatcagcatattatgcatattgattaatgacattgcactttcaataaacgtatcaccatttccgttgtaaatgccaatggttccatcaccattatccgaaaatgatgcataattgatcgtctcagcgctagctcgggccgacaaggcattctcgcgtgctttaagcgtctcaatatatgccgctgcattggcttgtacgttgaatatctcacctaattcagtaatatcctgatacagactatctaacgatgcatcaggaacactggtgctttgtacatatgttttaatccccatatcattcaagctgcttactgtaccaacaccccaatccgcatcctcaaacaatccaccacgccctacaaccaggtcaggcgtagcccctatggtcacttccttacctacatagccttcagcaagcacaggaatttgtttaaactcgtcagcaatatcttcaggtacactaccaaacaacgcagctacacctacaagtttgtctgtcaaaccaaggcgaatcatcagctcggctgcaccctgggtattggcaactactcgttcaggtgccttgtcaaacgtttgatccttcttcacccatgtgccgttctctgttgtatagtttgaaacgcttaatggatacgttgtttgagcagcacctgaagcgtctgcatccgatttcttctcatctgttgcaacatttttcgctgcttgctgcgagttattgtttgcctgatcgctaccatcactactattggagcaggctgcaagtacaacaacaagtgcagcaataaaacaaaataacatcccttttttaaagcgtgtagacatttaattctctcccttttgaatccttaattttctatttatgcattatgtaaaatagttattttcagtatacagcaaatgtcgaatctcgtaaatgataattataatcattctcaattgataagaaaatggacattctcctctccgtctttgcttttactttcgtcaagaataaccaaaaaagccgatcaatttgtatccattgatcggctttgcttgatactatttattctccagttgttctatctgctcttaccaaccgcggttggacatgcgatcttctggagccaatttagaaatttcgatccctttcatcggggcgcccaagtttttggatacttcagcaatcagtttgtaatccgtgtaatgtgttgtagcttcaacgattgcacgagcgaatttctcagggctatcggatttgaagatacctgatcctacaaacacaccgtctgctcccaggtgcatcattaatgctgcgtccgccggagtagctacaccgcctgctgcaaagttaacgacaggaagttttccattttcatgaacttcgcgcagcaactcataagctacacccagatttttggcttcagcgtacagctcgtctttggacatgttttgcactttgcggagctggctgttaattagacgcatatgacgaactgcctcaacaatgttgcccgttccaggctcaccttttgtacgaatcatcgatgcaccctcaccaatacggcgaagagcttctcccaaatctttggctccacatacaaatggtacagtaaactcatgtttatcgatatggaacacttcgtctgctggtgtaagaacttcactttcatcgagatagtccacacctagggattcaagcactttggcttctatgtaatgaccgatacgtgctttggccataactgggatagatacaaccttcataacctcttcaacgatggttggatctgccatacgagctacaccgccggctgcgcgaatatcggaaggtacccgttcaagagccataacagctgttgcccctgccgcctcagcgatttttgcttgctctgcattcataacgtccatgatgacgccacctttttgcatctcagccattcctctttttacacgatctgtacctgtttgcatgattgtattcctcctaattaacttttgggtggttttcaataaaggcatcgctctaatctatgatttagtatagaatgagaatggtcatataaaaagatccaatatttttggtttttattgtaccacttcatttataaatctggaggtcctatgcaatttcatgtagcttacagttcatatttgaaccgaaaatataccaagatgaaggctctctatcatgccattcgtgatgcaattcatgaaggtaatcttatacatggcgagaagttaccctctactcgagagttagccgcgacgtatcacatttccagaggaaccgtgaatcaggtctatgatacgttgactgcacaaggttacattcattcagagcatggaagaggaacctttgttgcttaccagttggatttgaacaataatgcgtccaccgagaaagcttgtacgcatcacttatccgcttgggggaatcgtattcagcagtttgaacagcagtcgactcaaagaaatgcaccagccaatgctcatacacatgattccagaatgaatagcgacgaagtaattgactttagcaaatatcaacctgatttctccaagtttccttacgatgaatggaataatcgattgtatgcagagataaggcagcgtgagcatcacctgaaaacaacttctgccatggttagttcaaccggggatccaaaattgagagaagccattgctgcctatcttcggaggatgcggggcattcaagttgatcccgatcatattgcagtaactgcaggctccatgcaagctatagctctactcactcaattacttgcagatcctggggattatgtagtgacagaaagtccttgttatgtcgggatttctaaagccatattggctgcgggtgcaaagttaattgaagctaatctcgacggtcagggcgttgtgccccaggactgggaagcacgtatgttgtttgtcacgccgtcacgacaatttcctactggtgaaatgctcagtctggaacgcagacaaaccttgctggactgggcacagcgaaatgatgccatgattgttgaggatgattatgatagtgaattccgatatcgcggaatgcatgttgaaccactgaaaacacttgataaagcaggccgcgtaatctacctgggcagctttaccaaaaccttgcctttagaagtacgacttggttatgtggttcttccccctacgttggctgacacctttagaaaggcacaggcattatacgagccaagacccgtcaacctgatcgaacaacgggcattagctgcattcatgacaagtggtcaatatgagcgtcatctgcgcagaatgaatcgattatacagtcgtaaattccatctgttactcaaacttttgaacaaacacctttctacatggtttgattgggtggagaatgaagcgggcctccacgtgtttggctggtggcgaggtaatgtgtccacttatgaggcctttcgggaatcagctcggtcacaaggtgtggtatactcagaagtcagcagttcaacggctgttggtatgaagtatggtatctatttgtcttttgcacatttgtcagatgaacaattacaggaaggcgtatccagattgaaaaatgctgttacaactgcattgtgaggtaaatcgtctccaaagtgagtacaagaagatcatcattcggaagaggggcgatcgttatgaattggttaaatgaactttataaaatgaataagcaggaaccggacaaggaaatcgaacgttctttggttaacgccatcttccgaatatatgaccggttccaccgaattggccttagagagcggatcggacagcaagaaatgtctctcgatatcgcagatgcttatatccatgggcataacgccatgattgaagctggtgtcggaatcggtaagtcttttgcgtacctgatcccaagtctgctcacgaatcaaatgtctcagaaaccagtcattatagcgacatcctccattcagctctcggaacagatacataaagatttaaggattattggtagccggttgggattctcaacggttcgctccgtggtgggaaaaggcatggggcagtatgcctgccgaagtagagcagctgaatggatcagtcttgatgatgctaactcctccgtgtctacccttgcgcagcgcatattagattatgaaattgatgaaagagccgatattaaagctggggttagtgatgccgaatggtcccacgtttccgtgaatgattgcaaatttgaacgttgtcatcataaaactgcatgtttgttttacgatatgagagcgaaattaaatgcaaaagctcacgagattgattttattatcgtaaaccaggacttgctcatacgagatttgatgaagaaaaaagaaggaaccaagagcatcatctcagaacagcctgctctgatcgtcattgatgaagcgcataatctggaagcaaaagttcgggatgccagaacactcgagttcacttatcggggaatctgccgcattctggataacacggtgcagcttctaacgaagcagtccggggataaaagtctcttctcacaatccaagttcatcaaaaactgcgctgagcgcgtcttcaaacaggtaaacgcggatctgctccaccatgccaagcaggataacgaccgaatcaaagtgtcggaaatcaaaggaataccgttaaaccaagtcttaaacgatttaaaagatctcagtctgcgcctttccattttgacctcacgccacgagcgggagatcgatgacgcttttgaagccatcaacgggcttattaccctcattcgtgtcttatctgaaatagaggacaactatcttttatgggcaagcagtcctctgggagtagccacgatcagcatctgtcccaaagatataagccaatttctgaaatacgctttatttaatggcaaggtacctgtaatcctaacatcagcaacgctgtgccaaggcggggatacgctggaggaacaatattcttatatgacggactccctcggttataagggagatttcctagagcgccaaccctccccttttgactacaccaaccatgccatgatgtatatttcgaacaaagttccctgttaccaacatgaccagcgggaaatctatcttgaagcagcttataaggaattggttcaactctgtaatctaactcagggaagaacaatcgtccttttttcagcaaaagaggacatgaagtacattcacaaaaagttgatctcaaaggctaatgaatacacatgggcagtccatgttcaaaaagaaggatcttcccaggacagtgtcatcgctgatttcaggaaaagcaaaggtgtcctcctgggtactggtgtattctgggaaggtgtgaatatcgaggggtctgacctgtcacaggtcattattttccggctgcccttccctgttccatcggatcctgtttatgaatataaggcatctgtaacagagaatccgttcatggaggtgtttgtaccggacatgcttcttcgattacggcaaggaactggacgcttgatccgcagtgaaacggaccttggcatactcagcatacttgactcccgtctcagcgcaacggctaaaaagagttaccgggaacaggtgttggacacgttgcctttcaaaaaagtgacggaggattttgaggttttagagagatttgttcaaaataaaaggatacgacgtacggattagaagtggtacacccaaacgctataaactgttcaaatcaaatcacatgaagaagcccttccacacatcaatcggaagggccaattttaatgctggaagtaagatttatgctacaatatattccagatctacgaatcccaaaggaggcattaccatggttgaaagaccaactacagaggaatatgcagcttattatgaagggtacatccagcttgttcctgaagggaacatcatcgaacgcttagagctgcaagccaacatcgtaccaactttgctcacttcattgacagaggagcaagcaaattatcggtacgccgaaggcaaatggagcgtgaaagaggtcatcggtcaccttttggataacgaacgcatcatgagtagccgattgcttcgcatcgcaagaggtgaccaagcgaatcatcccggctacgatcaggacgtgcttatgcagacccacccttttaatgtgtataccctggccgatttgagcgaagaatatgccgtcacacgccgctcaaccattcttatgcttcgtcgcctcaccccggaagcatggctctgtagagggatcgtcagtgataacactgcttcagctcgatcgattgcatttgttatggctgggcatgagctccaccatttatcagtacttcgcgatcgttattcgttggatttgaaattataaaattcattcaaaaagactttgaacctgcattcgctgtaggaacaaagtcttttctcatcagtcgttttatcattcaaattatcgttcaaaatgaatcagatgtgcgtcctctcgcgaagataacgtggaataatgattcagaataggaatgtccccattgaattcaatgggcagtaccacatagctagattgaaaataatccgatccgttccagcgatccgaaaagtacaggtactcctcctctgatcgtttcagcacaaacgctggttgcgtttggtacgtcgtttcatcgccaaaatcgctgagcatcccccatggtccatccatcgtattagccatcgcgtatttcccttgatttggagcccaacccgtgcaaaatgaggtcaccatataatacttccctttccgtttgaagacggctggcgcctcccgatattccccctgccacagctttccgacaagactttcgacattaaggtaatcttcctgcagacgatagatgtgcaggtctgcattgtctctggcagctgaaataaaatacgctgccccgtcttcgtcctgaaagagcgtgcagtcacgcgacatatacccgtacggattaaagttgccatgatacacgaaatgactatccggagaatccgatgtggcaatggcgcatgcggcatcgttgtaattgttaccattctcatagtgagcccagagtacgaacttttttgtcaccgcgttgaacagaactttaggccgttcgagatttacctttccgcctttgtcattcactaatgccagattcgtccgaactcgaatgggggcagctggcgtagatgtcgtcaggatatgattccgaaactcccagttgaatagatctttggaacggtaacaactcacataaatatcgtctctccgatcttcgccataccagtaataatagtcatcacggaataacatatgtccaccatgagcatggatcggattaccgcttgaatcattccagatgccaccattggttaattgattattcacaccgttacctctcttcttataggaacatcgttaattggtctccgatccaaataccttcacttcccaaagtcttggcgtgtaccaattgtttggattgttatgaagtgccgcattttgcatattaattcgtacatacctggcagcagtgctcgatagcgtatctgatgtgaaaccgtaagatgtattattggttcgatccaatgccacggtccagtttacattatccgtactggtctcgattttgtatttgtaaaaaccttcggagcctttttgcatccaccaggagatttgcacattattcaactgttgaacagagcctaggtcgaccttccaccaatgtggccaggaactgcctgtgcctacccattcggtttgatagttaccatcattagcataacttgccgagtttgttccagtagccgtttgggctgttgcaggtttaccttgcgacagcagttttccattctgaacgggaacgacaacatcatcgcttgtgttgtacaggacttgatcaaaataatcataaaatgcgtaaccatcggagaaccaaacgggaagcaaacgttcctccgttgttccattttgcgtgcctgcccagccgaacatccagcgatacgcaaccataaccacgttgttacccatatctggcttcacccgcatgacggaacccgactgcgccgagaaggttgacgtgttaccaatcgtccgtaattcagaccaatctccgtctatgcttgttgctgatgaatacagggggatactggggtaccaacctgccgcttgggaagagaacaaataataaataccatcttttttgatcattttaggcagttccctgtgttgattttgataaataacagaaacttgatgatccacatccaaccaatcggaggttaacttatataagatggtgtccgaattattattggccgtagagatcagatacgccgaatcatcatcatctttgaaaatggagatatcccgggattggttcccttccggtcgaaagcttttgtgaaatgtaaagtcttctccaggcgtggctgaagccaccgatactctggcaagtgtgtagtctgtactgttctcatagtgagcccaaaaaacaaatttgttcgtaggcgcatggtagaggatattgatcccctcaaatttagagttcgccagatcgggatgatccgtgtaggaaaggaccactttatcgttaccgtaggtgatgtcatccgttgacgtctgttgaatcatttcgccaaaaccgcctgatgacttttgcacgaaattgaatctgtagaaggtgtctccaactttaagttcattcgggagcataagcgttgattgtgttgtattatcaaaagttgtgaggttctctggtaggctgtaaggggtatattctggcgagacagcggaggttaacaaggaagttccgccatatgccttcacttgatatttgtacgaactacctatgttgaggtcataatcatccgtcgttgtaccggttaaggtctgtaataactgatagggttcatcgttctcggatctatacaactcgtatgcagtcgctccctggacaggtgcccaatggattttggcattggatacttcggattcattcttcagcacaaacagtgttgcagcaatatgggtctcttcaccagcagcgtgaacggtttgagctgaggacgttaaatgaactgttaacaacatcaatgcaatgacggtagccatccacgatttacctttgatcatgtctcatcatctccttttttagaagaccaaccttcctgttgccggaaggctgatccaggtgaaacttgactttatttcaaattcatcagtgtcattacatccgtctcgctggcttggttgtaccattcgttaacttcttcaatcacggtgtctccgcctttttcatgccactgtttgacaaaggtatcaaatgcttcaagcggttcattgccatatatgattttggtgaacgtctcctgttccatggtggtcaactgttcccacacattttgcatcgttggcgttggtggaccgttaaactcatttggtagtaaaacatctctgttttcatacgaaatccggtatccgtcctgcgtcgtttgatccttcgaggcgctctgaatgaggacacccgtgtcggctttaactccattcgccagatcgtagtaggattggccgggaccatcaacactcggtgtatttttggtaaatgccatttttccaacgccttgcacggcttctaatggcttattgaatttcgttggatcaaaagtgacttcatcgttaacgatatcgtaatcgtatccttgagcgtagccgtatttgaactctcccgtgctgaacgctgcgtcgtacattttatcgtagtacaggaagaaagcttccatgttctgaaagtccttgttaaacatgaacacaccatcgttcaactgggcggattggtaggtcttatcaccgttcacaccttgaatggtcggataagcactaattttcgcaccatccacatttttctctacgtctttcacactgtcgtatagccaaggacgaccaatgataatgcctgctttcccctccgtaaaatcggacagtgcgtcccaggccccttgggtggccaattctttgttcaaatacccttttgcataccaatcgcgtaacttggccagtgcctctttgttaccatcagccacagatccataagtaagttttccgttctcgttataccattgtcttggaaggtgtttccccgtgtatgcgctgaatatcatgaccggatcgctgacccagcccgtattgtaggaatctttccccgaaaatgtaaagccgtatgtgtctttcttgccgttcccatctgggtcctcattagtgaacgccgcgatgacttgctcaaactcttcaattgttgttggcgctttcaaattcaatttgtccaaccagtccttgcggatcaacatgacttcgccttccgtcagattcggcgcaatcgccatcccgtagaccttgccctctctaaccactggattgaaggtggtcgggtattgtttgtatatttcttttatccggtcaggcatgtaggctgagatgtcttccgttatctctttgacttgccccgaatcgatcagatcattgaccagcatggtgtcatagacgggcagaacgtcgggcaacttctcggaacctgtcaacgccagccgcagcttggtattatattgtgaagcatcacctcccagcagggtggtttggattttaatgcccaggttttcttcgccccaacgggtcaacacattgtcattcaacgtttcaccattgatatactttccagcattttcatcctgttgtttggcgatggtgatcgtgaacggaggatcatattttccgtccttaagcaccgatgccggtgcggtctcggacgcactctcccctttgctacagccaaccacaagaacagccgacagcataaccatacttaccattttccataaatcagttcttttcttcatggaaacatgcccccttcactcatactcaatttgtttgtcgtcacaccaactattcttttacggctcctagtacaattcccttcacgaaataacgttgtaaaaaaggatagaccaaaatgatcgggagcgtgcttacaaaaatttgcgctgccttgatgctctgttcagacatggctgccacctcagactggctcatcgccatattctgcatattgctctgcacaacgaccgtctgtaagaacgaagccaacggatacttacttgcatccgacatgtacaatatcccgtcaaaccaggagttccagtgccccaccataatgaacaaggatacggtcgctatgccaggcagagataatggtaaatatattttgctgagaattacgaaaaaggaagctccgtcaatgaaagctgcttcttccagggctttgggaatcgttttgaaaaaattgacgagaagaatcaaattataagcaccgaaagcgcccggtaacacaagagcccagatggtatcctttaatccaagggctgtgatcaatatgtaagaaggtatcaatccccccgagaagagcatggtaaagataaaaaaccacatgagcacgttgcgtccccggaattccttggaaagggcatatcctgcacaggtaagaataaacatgctgatggttgtacccaatacggttcgagtgatggatgtcagcatggcaccgttgaaattagaattgttgaacgtttttacataggcgtccacattgaacccgaccggccaaaatgaaaccatattaccgctaatggccgctttgctgctgagcgattgtgccaacagatgaagcagtggaagaaaacacgccagccccgctagtatcatgaacgcgtaattaaaataggagaatactctataacctgtcgttttatggtacatgatccctccccctccttgttagaatattttgtaattggcgtatttataggccagcctgtaggagacaacgatcaagatcaagctaatccccgatttgaacagtcctacagctgtcccgaagccgtattgcccgtttaacaaggatgaacggtaaacataggtgtcaataatatctcccgtactgtagacaagcggattgtacagattgaagacctgatcaaaacccgcgtccagaatatttcccagactcaatgtagaaatgacgatgatcatgggcaacatgctaggcaaagtgacgtatcgaatttgctgccggcgtgtggcgccatcgatctcagctgcttcgtaataagaaggattgatcccagcaatggtcgccagataaacaatcatgccaaagccaaagctcttccacacatcgctgatcacaactgtgaatcgaaacagatcaggatcacccaagaagtaaatgggatcgttcccgaaaatctgggtcaagatgtgattgatccctccgtctaatcccagaatgtcgatcatcaaccctgccacagtaacccaggacaagaaatgcggcagatacaccagtgtctgtacacttttcttaatgcccatatttcggatctcactcagcagaatagccatgacgattggaacgataataccaacgataattttagaaacggcgataattaacgtattaacgatcgcttgtgtggcttctttgtactggaaaattcgttcgaaattatctaacccgatccaccgtgaacctgtgatgcccagccatggtttgtagtcctgaaatgccatgagcaaacctaccatcgggccataagaaaagatgcagacaaacacaaatgcgggaatacacagtacgtacaaaggccagcttttcttgatttcctttttgaatgaagtccgctgggatagctttgtttttgtttttttcgcggatctggcgggtacaatctcgttaatgttgcatacctcctctatgatggttcttcaaaagcgatccttgaagataagcttaacaaaagcgctttcactccaaaatgccaaaatttcaagatcatcaccccaccctgaagcactttaaaaccgctttcatttatcgccgttgctacccttccgcttttctagggtttggcttatattaaagttaatccgatctggagtttaaacttctgcgtttggcgatatgaaaggaaacacatatgatcagaaaaatgtatatgaagcgatttatctatttctttgttttttttctgctactgacgttaagtttgtttttcgtgatgaaccgattaagctccaagacacttgaagaaaatctgattggcgcttccaaaaaccagcttgattatgtgaaaggcatattagacgggattatatacgaagctaacatgtacggggttcagtatgcggcagacagtgatgtccgattttatcagaggcatgttatcgagctgagcaattacgattcccaaatgaagaaaaacgagattgttgatcgcttgcggcaaacactcctctccagtcgatcgattgaatcgatcggcatttactggaagtctgaagaaacgtttctgtccaccaacagtacgccggaggcgagacttccgttcaaggatgttcatcaacggggatggcaaatcgtcggcaatagcttgtattactttgccctctacccttacattcaaaaatccggacaaactgagcccactcagtacgtcgttggtgtaaagctgaataccgattatttgaaaaatctgctgaaaaaggctgtgaacaacgacagctcaaacgcttttttttggtttaattcccatcagctatggagtgagaaagaagtcgacaacgatctattgaaagcggttactgaaatactctctccacagccggagatcactttgaaatatgattatcacaccaagtcggacgattactatgttctttcccgatatattgaatcaatcgacgcctacctgattacatatacacagacgaatgattttctgcaaccgattgaccgcaaccgtaaagttttttttgccagcattttagccgttttcacacttggcctggttgtgatctttacgttttaccgaaactattaccgtaatattcgtttgttggagcggaagttttcacaggtcgaacaaggcaatcacaatacacgtattaccgaaaatacggatagagagttttacagcctgttcagaagttttaatcatatggttaccgagatccaggatctgtttgtatccttgaagactgaaacggaactaagacgaagtgcggaacttcaacaactccaagctcagattaatcctcattttttgtacaacagtttgtttttcatcatgtcggtggctcagttttcacctgattctgtcatgcgcatgagcaaacatctagctgaatattatcgttatttaaccaaattggaccggcatgaagtcacgctggaaagcgagcttcagtttgcggaacatttcctgataattatggccctaagcaaaaaaatggagtacagcattgatctgccgccagaactgtcttcccttcccctcatgccgctgatcatccagccagtggttgaaaatgcgattcaacatggcattgaaggacaacaaggtgcccatcgggtgacgattgaagtaaaacagacggaggttgcgataacgatcaaggtctccgatgacggcaaaggtctttcgctggatgatatccgcagcctggaggctcgacttgagagtgataccccgcctgaaggaattaaaggcgtagggctatggaatgtaaatcgacgtctgaaaaatacgtacggcgaacgtagcgggttacattttggtactaatgattggggcggcttgtccgtcctgctgctcatcagcattcccgtggtgaaaggagataactaatgcgattattaattgtggatgacggacattatgtcgttgaatatatgaagcacttgctcgattggaacatctttggcattgatcagatcgagacgatgaccaattcgattgaagcccgagacatgttgactcaaaaccacatcgatattctgatcactgacatccgaatgcctgaggtgtctggtattgatctgcttcaacatatccaccaacataacttgccaaccaaagtgatcatcctttccggctactccgagttcgaatatgcgcaacaaggaatccgtttaggagcgctggactacttgctcaaacctgtcgacaaagatgatgtggagaaagccatgtccaaagccatcaacaatattacaaagactcggcccgctcaatctgttgcatgggagaacttcgatggattggagtatctgctttccctgcttggtcacaatgagacattaaggaaggaatatgatgcgtatactgaatttttagggcatcgtcgtatgtgctgcttcaagctggagggtttcacacaggaacatgaggatgctataaaacatgctgtcggagacaaattggatcgtctcgtttggaatgcgggaacgggactgttcggtcttgttccggaagaagctgctggggaactgaccatcaaactggagcaatcagtcgcgtctcctcccttttcattgaccgaccgaaacgtgacccggcagatgttctacaggttctttcttaatgaggacgtatacttagaagacttcaatggcatattcaacaattctccgtcatgcggtgattgggagtcggcgggaaatatcattaaaaaatatgatcacatccatctccataagcaaaaaacaatctttctcatggagaccattctatatgtatttctgacggataaggatcgcgatccctctgaaaccgtggagtggatattcaaccagttacggtatcctgatgaactatcctcaactctcatggatcgggtcagtcggatcagaaacaacaaacagatgtccattcaaaccatcgttgacaaagtacaaacgtatatcgaagaccatctttcacatggccttagcctggacgaactggggaaagttgcacatctccatcccgtttacttctccaaactgtttaaacaagaaacgggcgaaaatgtgtcaaactacatctccaggaagaggttggagaaggcttctcaactgcttcaagattcggaactccgtgtagccgatatagcccagatggttggttaccgaaaaaatcaatattttatccaattgttcaaagtggaatatggagttacgccctaccagtaccggagaaatatgatccatcaatgacttcggttgaatatgttacataatggatatgtccaatgcagtaccgaaaaagcccaacttccactcttcagtttaaagagtgagttgggtctttgtagtgcaattaatatataagaaactttaatgaatgacgtagcgatttttgttttatttgtttaagacgctgtggaggtgattgaatattcgtttaatcttgggttaggtcgaccatcttatcccctatgcctctatttgtgttaaggttctccgcgctatttgcaacggcaagttatagggccatcctttgtggggatgaccctgtattataatctaaattttttcagttgtcttcttcgttaacgcctgcatttcgctcataaaaaagcgttattttttcttcacgggtatccagatttctcctgaaacattcccatgacgtgccattccataatacatctcgaaagtagggccctcaacctgttcgtattcagatgtcggaaaccactcagaatagattcgttcccatagtttttgcatatcacactgcgctccgggaagaccgcccacgttaatgttgggatagcaagttttgtgaatctctccggaatctcaagccccttaggtacatgataacagatcatgtatttgaaagattctttagtgtgatcataaagggcggcgtgtaacatggtgtcaccaaaacgtcccagtaagtcgttcatcatatcaacgctgccatcatcatcacattttatacggaatagaggaacttcagagaacgctgttttctggtctgcatttataattccatatactccaaacatctcaaaagaatctctttgctcaatacggtaattcatttcgacatccccttttattgaaatatgaaaggacattcgaggataggcttttagagaaacgcctgtatcacgcgcggatataggcataataccatgaagattcttaaaggcgcgtgcaaacgcctccggcgaatcatatccatatttcatagctacatcaataacctttgagcctgttgtctgcagttcgaatgccgccaatgtcaaccgtcgacgtcgaatgtattccgataacgttacgccagtaataaatggaaacattctttgaaaatgataggtagagcaacaggctctatgtgctatttcatcatatgaaatagtgtccgctaaatttgtttcgatatattccatggcactattcatcctgaccaaccaatccatcgtactccctcccttcaaggtaattttatgggaaataaataatgaataccttgcaatttctgcacgaaaaagtcagtaaaaaacttgatcgtatttatgatacagttcaccgcgctatctataacggcaagttatgtttttcatgaatattgtcggaatccacctaaaagtggtagagtaatgagataggtcttgaagtttatggaaggttgtgatgtatttttgagttactacgaattgttaaatagactcggtttccccaatgacccattctccaaagttaatgcagatgaagaagaaagattagaggaatactttattgaaccacccttctttaaagccgttcaaggcgttccccatgatccaaaatcctatattgtatttggtccacgcggtggtggaaaaacagctcttaaaagaaaaatggaattagcaagtgctaatgaagatgtcaattatttgtgcgtcacttacaacacctttgatttaaccggtttatcactaaaggaagttaatcttgattatcatctcaagaatattgttaagttaattttaattggactacttccggagattattcgtgtaggtccttcgaatattgccaaagatgatcgccacattttgtttctgatgatcagacactacttcacagatgttgatatttatcaattaagagaatcagttgaatcagttaaaaacattggtcagaaagcaaaagaatggtggaataaacttattaatcctatcggtaccctgacaagtcttgtcctaatgtcttttggcttatctcctgttgaggttgctaaaatagaagaacaggaatataacctagggacacatattgatcagttgaaatgtctacagcgtattgctgagaaagttggttattctagtatttatatattaattgataaagtcgatgaaaacgatcttactggttcagcaatacagtcatatacgtttattgagcctttgttaaaaaatttatctgtcttcgaattaaaggggtatgcctttaaactatttctatgggataagatttcatctatcatttctgagcaaaaagaggaagaaaagattcgtctagaccgaattcagaaccgtaaactgagatgggatcgtagtcaacttaaggaaatgttatccaggagacttttagtcttcagtgatcagagggtttcttcattgaatcagatttttcaaaatctagagggaattgattgggatgaagtcgtcatcacttttggtcttggttctcctcgtactattattaggatatgtaaagaaatttttgaacagcaaagtgagattaattcagaagcaacaaatatatccgtggctgctatcaaccgtggtattaaaactttctgcgaaaactatgccgaatctcttccagacactgtaattcgcgaactattaaaaaacaaacgagttgacttcacaactaattatattggcaatgatgtatataagttttcacaacaagcggctatatcgaaaattaaaacttggctagatgccgggttggtagaaaagatcggagagattcaagttacaaaaggcaataaaccaagccatcattttggtgtaactaacgtcttagttgctaagcatatattttcagaactatccgttgctgaatttcttgaacagaaaattcgttattgtaaaagttgtggaatgccgttaattcgtgaatggaatattaaaaatgaatatcgctgccatgaatgtcaagaaaataatatacaataatattaaggtaagtcaaaaggaatgccctttaattcaatttagagaggcattcctttgtttttattaatatttgtttatataaacttgccatcacttgtgatacggttcaccgggtcatcactggagtaatcaagaacagactagacatgagcgaatcatctggaagtacaacgatgggactggtttttccggcgtatcttaatcggatactctcgcaatctatgttacgaagtatatcgataaaaaactttccatttagtgataccataaattcttccccacacatctctaatagtggaatttcattgtgaatatctccaacatcggctgttttggacaatagttttaatgtatctgcattagctactaatctaatcacttgttcactagccattacagttacgcattcaactgctctcaacaaacatgctgtatcaactgcgatttcacacaaataagattgagggattacattctttatggatgggaacgttccttcaataagagcagactccactttcagtccagttgtcacgaatttaactcgattattactcacttcaatttcagttgtgtcatctgttttgtttaatattttcgataattcatatagatttttcgctggaataatagcgttcaaactgttgtgggtagcgtcttctaaatgcaaagcgcggtatgcaagccgcactccatctgtagcaattaagttaagacaatcattactgcattccaaagaaactcctgttaatatggggctggtctcggacgttgatgctacgattgctagctgtttaatagtcgaacgaagtaaggaagtattaatgcgtagtttagtagaagggaacgcctctccatcatcaatggaagggaattctgtagggtccatcccgcataaacgtaattgagaatgaccggatacaatcgaaagaatcattggctctttaatttcaagtataactttgtcatcattaaatttacgaataatatcgtgaaaataacgcgatggtataacgatagcccctgttctttttacagtcagagaaacatcatcttgagcaatcatagactgtatcgtcatacttgtattacttgccgtaaaagtaacgccatctgcacctgcttgaatatgtattccttgaagaataggtattgaactatttgctgctactgcctttatcacatattgtatggcattcataagagaattttttgttatctctaccagcaaagacctcacctacctcgaataaaaaaattattttgtatagaaggactcaatgatgttacgtatagcctccgaacgagaaagtttatgctctgtgcaatggttttcgatttccccccacatgtcctctgttagagttaaagatatttttttagtcacacctatactctttctcccggaaccttctcgcagaccacctctcgaaaagacaaaacctaactgcccttctttattagcgacaccaactttaaccttattattgttcaatataatgacgctccttcattttgatttaggtaacctcattcaaatggatctcttctcatattatcatgtctctacatggatttacaatatttcaaaagcgattgctgaagaacaactcatcgaatgtaaagctgggactatctcaaaaggaattcccttcgcttcaagcgctaacgaacctaccacactttaaacggcggatttttaaggaacgcagcatgtaacgaacctcattaacttaattccatcgtaaaccgcctaaacatcaaataaatggaccaactcgatgaaataacgtctctatgattcgttagaattcaaacctatgcaaatgagagcaaatagcgtgtgctaggtccgttagaactgtataatcctgacaaagggctgtacccggtcatgctcatgactcacaggacagccccaagaaaataattacgtatagacacctttttatatactcaactgaacttcgggaatcgaagtgtcgcttcatgttcgggaagaaagaagcttttggggaatgaccaccagatttgagtatccggttgttgttcaaaatcgaattatgatccatcaatgagaacgaataaataatttcatcaaattgatataaaacgggttgaccatgtagccattcggacttacggaatatctcttacccgtgtccaaccgtcgtatttgttccatttccttctcattcaactcaaagtcgaatgtttctttgttctcttttatccgttgaggattcgatgatttggggatgacaataattccgcgttgcagatgccagcgcaaaatgacttgcgcaaccgacttctgatggcaaagggcaattgccaccagctccggatgctccagcagcgctttgcttccctgccccaacggtccccaagcctcatgcagaatccgatgtcgaaccatataatcatgcaattcgtgttgcggaaattccggatgggtctcgatctgatttaccatcggcgaaatccgggaatgtttcttcagatgctccagatgccggatctcgaaattggctacacctataactttgattttacctgcgtcgtataactcttccatcgccttccaggcgttcacgtattgaggaccggcaaaatgaatcaaatacatatcgagatatgttacgttcagcttctggcaagtctgctcgaacgcctttttcgtcgcacggtaccccaggtctgtcgtccataccttggaggtaatgaagaactcctccctgggaatgccgctgttttggatgacccgacctagcgccgcttcattaccgtaaattttggccgtatcgaaatggcgataacccattcgaatagcctcctcgacagtcctttcgaaggtccccccgtctttgatcttatataggccgaacccgagttgaggaatgtccactccgtttgccgctgcgactgtctgattcattcgcaactccccctccccgttttttctaattgttgttccgatgcttgttcttcacattgcgttagcaacttttctatctcgttcaccaggtttttcaacaatttcaacttgctaccggagtcaaggctgtaatagttgagagttccttctttacgaacacttattatctgtgattctttcaatattttcagatgatgtgatacggtcggtcgggaaagatgagttttcatcctgatctctcctacgcgcatgccgggtttttgcggcccttgaatcaaggctatgaggatggcttgccgggtttcgtcaccgatcgcattcaacaccttctgattgttcttaaattcgatagcaatcgtggtcgcaagttcctgatccaggtaaatcatccccttccatttagaatgtgtaatacttttgtagatacagcctatcacaatctcggattcggctgtacatcgggaaagaaattcaagaacctattttttccatgtcttaagaatacattagcaaaagaagaagccacccctgacgaatggagtgtcttctattaatggttgttatttttttaaaaaggcgtgaaaattccaatcagttgttgaagtaatgagactgtttaaggtcgggaatcagtgcaggttgcactggccgccatcccataagttcctgagttgcaatgcttgatctcgggatatcgagcgatgcaagtgtactgagaaagccaaaatgggcatctgcctcttcgcgtgaaatgctgactacaggtacgttcagctgttcaccaatagcactcgcgatgtcgcaaaatggcactccttcatctgcgaccccatctagtcgtgaaccagcgggtgccttttctaacgccaggcaatatagatgcgcggcatcaaggcgatgcacagccggccagcggttgttcccctttcccacataggctgagaagcccttagtcttggcaatattgatcaggctcggcacaaatcctgtgtcaccctcaccgtgtaccgatggacaaagctctacaatcgatgtacgaactccacgccctgccagcgctaacactatgttctccgttgccactccattcacatgtgtggtgattacgaacggcttgccagatccttcaagtgccgcccccatcgcttctacggcatgcagatctgttgtgagtgctccagcgaagttcgagaagtcgtgatggaatgccagatgaatgacgccatccgcagaagctgcaccactacggaggctgtcaagatcgttgatgtcaccgcggtgtacttcggccccggactcttctagtttcgcagcactactgtctgaacgcacgagaccgatgacctgatgccccctttcaataagttcgctggtgacagcggaaccgatgtagcctgttgctcctgttacgaaaacgcgcatcatgaaatcctccttaagttactcaccctcattgtataactatgatcaccaagcaatgggtccatcctcatctgagaatgttcctgttgggccatccgctccaatcatcgctagccggaccgcttcactagccccttgttcaacactacgagtaccagcaaaattattaagcgcagtggatgtgaagcctggacatgccgcattgaccttgatgtttgttgattcaagcgcaaatgcaaaggcaagtgtcaccgcatgaacagctgattttgatgccgaataggcaccaaacatcgcacgatgcgagttttcgggaatagagttccagctaagggagccgccggtactgcctatgttgacgatacgtgctgccggggcctcccgcaaaagtggcaacatcgcctgtgtaacagcaataactccaaaaacattagtctcataaactgtacgaatatcttcaagcgaagcaacggtcaaaagaccactcgctgcgccaccgtttggaaatggttcacccgatctgcctgcgtgcgagatccccgcattgttcacgagtacatcgagacgaccaaattcgtcccgaatacgttctgcagcagcagcgatggagttttcatctgtaacgtcgagctggagagcgtgtgaatctgaaccgatgctttttgaggcagtttctccattctcgaggctgcgagatccaacgagcacggtgaatccctgtttcgtgagatccttcgcaatttgaaggccgatacctttattagccccggtgaccagagcgacaggtttatcttgcatagttataatctcctttttctgtgattggtgggtccatatgaactaagttgacgcgtcaaccttggattaaatttagcagattgaagttgacgcgtcaaccatgttattatgctcctatggataaaaatgaacttaacgaagaagaaatgcgaatatggcatatgtggaaaggttcctttcagaccatcttcggtcgtatcgtcaaagatatggctgatcactcaggattgtcagagggtgattttggagtattggaccgattagtcctttttggggatggtagccttcgtcaacaggaattagccgactctatggactgggataaaagtcgattatctcatcatctgaagcgtatggaaaaacgtgggctcgtgatgaagaaaccattagacaacgatcgtggagtacaagtcagtatcacttcttctggaaaatcaatgttagatgatgcccgtccctacctctccaaggcaatacgcaaacatttttttgaacaattaaccgaacaagatatcgagttgattactaaactggcggaaaggacaaactcaagctcttagcgtcttatctagccgccgtctcgaccacgtttgttaaaggtgagcttctaacaaacgtggttttggtttgtcaaccaacgtagaaggtatatgaaaaatacgtgtcactttgtgaggatttaagtttttgttctcaacatctaacatgccattatctggtcacaaatcgagatgatagcctctaccttgtaaacaattaaaatcgtgctatccttaatgatgaggtggatcagatggcaaatattcaagagattgcacgtcttgcaggcgtttctacagcaaccgtttcaagggtaattaatcgacatccttatgtaagcgatttaacaagagaaaaagtcttgaacatcattgagcaattggattatgtccctaattcaaatgcaaagtctttaaaaaatggagcgacaaaagtcatcggtgttatgggtgttacttacaatccccttttgatgtcacttgtccgttcattccacatgatatcccaaaaatacggattcaacattatgctttttatgacagacggagatcgtgataaggagcttgtagcgcttgaaatgttacgcagtaaacaggtggatgcccttctttgtctggtacggacgattgagtgggatatcatcgaatcctatacgaaatatgggccaattgtaacatggcagcgtcttaccagcgacaccataccgtccgtatttatggaccaatatcaaggttatacgctgggtctcgaatatctgtatgccagaggttatcgtaaaattttgaacgtgtattcgtccaaaggacagaataccttggagcgaataagagcttatgaggattttgtacagaagcatgggttgaagaacactggctttccgcaatttcataataaagtcaccattcatgatggtgaggaaatagcgcgatggtggatagaacaaacggacaagccggatgccatttcctgttcgactgatgaggtagcagcaggtattttaacggagattcaacgctcggggttttcggttccggatgatgtgggaatcatgggatttgataatacagacagcgctcacctgctggatctgacaacgatccattaccccgtggataaacaagcagagaatgcctttaatattattatgaatatgctggaaaattcggcatccaatcttcatcctcttcagtttagactgattgaacgaaaatctacataaaacaacatccatccttttaaacgaagaaaagagcccatttgagatcatgagttcttttctcttccatcccgttaaacttcatgaacgaacaacattcaggcctgtctctatatgagggacaggcctgaatgacttcaatctctaaataaattatttgtgaaattgcggaagatgttctttatgcgcttccaacatttcatctaaaactaccttagcaatgtcaccgctggtaacgagcggattaagtgtgaatgcttgtagagcggttgcataatctcctgtgaccgctgcttcgatcgtcagttcctccattgccttcatcacctgcaatagccctttttgggcggacgggaatgcgccaaagtgaacaggctctgcaccatgggctgtaatgatacttgtaacttcgatggcactgttatatggtagatcgctaattgctccgcggttctgtgtgttgactaccatatgcgttcccttgttgttatatacagaattaataacttcacaagctgcgtcgctgtaataagctcctccgcgtttttccaattccttaggcttgtaattcaggttaggatctttataaagttcaaacaaactttcctccaggcgtttcacaacctgcccgcgagttccttcgccattgaccgcttctacttcctcttcaagcatgctgtcagtcatgtaatagtaccggtgataaggacaaggcagcatacccagttggagaatttgctcatacaagaaacgcatgctttttatattttctaccattttttctggctcggcatcaggaccgtagagctttttgatggcctgtttagttagctctttaccatctcggtcataaattttgtgccagtgaaggtgattaataccggcaaatttgaagaacagttcctcttcatttttttccagaacagcagcttcattcttggaggaaataatcggaacattgcacaaaccaatgaccttctcccatttaccatattggagcacagcttccgttaccattcccgcagggttcgtgaaattgattaaccaagcatctgggcaaagttccttcatgtcctcaacaattccaagaacgaccggaatggtacggaatgctttgaacatcccacctgctccgttggtttcctgaccaatcatcccatggctaatcggaatcgtttcgtccttaatacgagcttccaaaaggccgacccggaattgggtggtgacaaaatcggcatcggccaacgcttctcttcgattaagcgtcaagtgaatatcacagtcgattcccgccgcttttaccatccgtttagccatggctcctacaatttcaagtttctctcttcctgcttcaatatctacaagccacaattcacgtattggaagttcatgatgccgtttgataaaaccttcgatcaattctggggtgtaactcgatccgccgccaatcgtcacaatttttaatccctttttcattttgaagtcctccttgttctattgtgttctcaatttggactctatcttgtgtaatgcattacatgtcaagaactttttttatgggattaaatgggattaatttgtaacttgaaaccgctttatcacttgtgctatagttacctcaaataaggattgtgaccgttgattcgggcaatacctaagaaagtttgaatgccgttaaccaattggcggcgtttgaactatcttaggttttttttatgcatattgcagaaaacaaggagccgatgcacatgattattgaaaaagtattaaacaataaccttctgctgacccgcaatacaaaggggaaggaagtcatcgttatgggtaaaggcatctccttccaaaaaagtgcaggtgatgtggtcgatgaacacaagatcgataaaatcttccatttagccgagcatgcatttgctgtaaaaatggctgaactgatacatgaattacccgccgttcatttcgaagttgtgaacgagatcgtaaaacacgccaaccatgtacttggtactgaactcagcgacaatatttatctgtcgttaaccgaccatattagttttgccatccaacgtaagaacaaaggtatggagattaaaaatgccatgctgttcgaaattaaacgtttctataaaacggaattcagtatcggattggatgctctgcagttaatcagcgacatgattggagtttcgctcggggaagatgaggctggttttatcgccttacatgtcgtcaatgcccgacttgacggcactgaaatgaaaatgacgataaagatgactgaaattgtcaacgagattttgaaaatcgtcacgtaccattacggcactgttcttgatgaatcgagcttaaattattcgcgtttcttaacacaccttcaatatttcgccatgcgcttattgcgccacgagattcaccaaagcggcgaagattttttatatcaacaggtgaaaaagacttatgtcaaagccttttcctgcacttgcaagatcaacgagtacttagaaaaaacgtatgtacagtccttaaacaaagatgaattcgtttacttaaccattcatatccagcggcttactgaacgaagcactttatagccctatttctttcaagctaaaacttcatatacaacacattagataaaggattgtgactggtaaagcaggcaaaacctggactgatggcaaaatgatttttctttttattttgccacgagttcaggttttgctgctttttgaaagtgaaacgatgtaagccggcacatcaggaacgaacagctcacaacctgagatcaattacccatcatgaaggaggcaatatgctatgagtaataaagacaaagaactgtccatacgtgttattgaacttgttggcggtgaatctaatgtgaatgatgtatatcactgtgcaaccaggcttagattcaccctgaaagatcatacaaaagcgaatgaacaggcgttgaaaaatatagctggagtcatcaccgttgtgaaaagcggcggtcaatttcaagtcgtcatcggcaataacgtgtccaaagtttatgaaggaatcatggagcacaccaaccttcaagatggcggcagcaaaacggatactaaagagaatgcagaaaaaacaggaatattcgggaaaaccgtagatcttatttccagtgttttttccccgctgctcagtgcgctagctggagctggattactcaaaggtctggttgttttgtctgtggcgctcggctggctagatgacacctcaggaacttatctaattttaaacgcggcatcaagcagtgtattcacctttttgcccatatttttggcagttactgccgcaaggaaattcaaagctaatatgaacgtatccttggctattgcaggagccttggtctttccgaccatttccgctgcgtttaatagcggtcaaacttatgatttcttaggcatccccatagtgcttgtgatgtacacttccaccgtgtttccaatccttctggcggtgtgggttcaatctcatatagaaaaatggttcaactcgattattcaccagtctatccgcaatattcttgtgccgatgctgtcgcttctaattgtcgtcccgcttaccattcttgcttttggaccgatcggcaacagtgttagtcaggggttagctagcggttttacctccctcatgcaattcagcccaatgttggcaggagcagtcactggtggtttctggcaggtcattgttatctttggacttcactgggcttttcttccaattacacttaataatctggcgacaataggctatgacttaatgcggccgatgttgaccgcagccgtgctggctcaagccggtgctttgctcgccgttatgctgaaaacccgcaattcacagcttaaaaccctttccggatctgctacgattactgcaattttcggaattacggaaccaggcatttacggggttactttacgattgaaaaaaccgttcatttacgcatgtatttccgcagcgatcgggggagcaattatcggagtcgggggtggtcgggcagtcgcttactcacttcccagcctgctcgcttttcctacttacgtaacaacggggttcgcctcggttgtgatcggtgtttccgtttcttttgtcctggcttttctactcacgttgctgcttggattcaaggatcttgaggctactgttgaggagccgcagattgaaacttctggacaggaaaaacaagcgattgagccaagcgaatcgcggttgaacaaggaaatcattgtgagtccgctgaaaggcagtgttcagctacttgaagatttgcctgatcccgccttctcttcaggtgccatgggacaggggcttgtcattgaacccacagatggaattttggtatcgccaatcaatggtgtcgtaaccaccgtatttcctaccggtcatgcgctcggtctgaccacggacagtggcatggagattctgatccatattggagtgaatacggtaaagctaaaaggacaattttttgagaaaaaagttaaagagggcgatcgggtttcttgcgggcaaatgcttgtagagtttgacgcggagcaaatccggacagcgggttacatcactgccacctcagtcatcgttaccaactctgccaactacttggacgtgttaaaaactaccgagcaggaagtgaagcaaggcgattatctaatgtcggcggtagtctaacgattggagatggattccctgttggtaatcgaactattttcgggttatataactgtctactaattcacttattccgtatgatccaaagaagccactcctgcaaaggagtggttcttctctggatagcactttccgtttatttatcagcgtaaggctattatgtagcaaactccttcattgcttccaccccactggttgatgcgaatggaggcctatccaaagaaaaaagtgatgcataattatctaatcgatcattggaataagttctttcccctcaacctttgagataggcaattacatgaataaacaaaaaaagccgctgctttagcgactttgaatgatatttctccagcagagtattctatgaaaaatatttccctgagtgcagatcttctatttcttgagaaagtcttttagtatgtaacttcatataacattgagctttttgcaaaatatctgtatgcccgcctagatcatacaagattgtagtagataacacttgtacaatataaaggctcgtttgagttgccatccattcaaaaaaattgaaaaacttctcaatttgttctgtatcatcattttcacgaagcaatccttcaacataagtagccacttcatcaccaaaaaacacatgtcctagaaactcttgatataaatccaaatgttctatataacaatcgtggaattcaggaaaaagttctaagaattgattgattaaaatacctttgtccattctccaagctccctacttccctacctacacatactcactgttcttttcgtttaaaaaacatcttgccaaccataagtcccatagccgatgaacagatcagatatccaaagaacaagaaaagtaaataaacaccatgaagatctgcaggaatctgtttcaaaccttcaaaccaagcaaaacgaaaaggataaaagatgactacccaaatgatcagcaagaaaagaagaaaattaattatttttagcacaataatgatcctttcaaacttgagtggaaacagttgaatgtatacgcttcatatttcatttcgcattaccttaccactgcccgcactatattagttagcttatgtattagggttgatatgttgaatctataaaactacaaattgtaacaggaaacattaggggtatttcttattcttcagtgagtataacaaataaaggtaatataagcatacaaaattaattatggtcattcttcgtgctagaacaaaccacctactcttagaagcaataccagcgtaactgacaccacccacaaacatatggataaaaatgcaagaaccctcctagtctggagagttcttttatgggtgataaatgtactaattgcggcctgtttgttaaactaacgctatccgttagcggaatgacctcttttaatttatggttggtgaggatgtcgattcagaacggtatccaaattcattacctatatacaaatacaggaaaatatcagtttatagactctgccgaaatcgtcttacacccgttgaataccgcaaacttttggaaacaactgttcaaggctgttcgcaattgcattgtttgcttcacaccgttctcgtaccagatatttttaagaacgagcgttccagtttttcgctccacgattatctcggcccgtccaatgaagctttctccatataatagaggcagcacataatagccgaattttcgtttgattgcaggcgtgtaaatctcccaggtgtaatcgaagccaaacaatgtgttgatcagttttctgtcccatatgaaattatccagcggggcaataagctcacaacgcaatttctgctcctgatttctcagaacggcttcaataagcggtaaatcctccgcgaggcagtacagcatatccttcatttgttccacagcaacagcaacaatgcgatattcgtgtaatagctggcgaaaaacctcggtgcgctgtgctgctttcagcccccatatattcagccatgcatctgacgcacgattccataagagaccaacagagccgattcgacgcagtacccgccacttatgatgctcaagctcatcctccagcggctctgatgcattcagcagatttggttgtatgtacttcttggccatatcgtaatatttacgcgttccttttttatgatggataatcaactcacccgtcgaatacatctgttccaacaccgatcgagatgaattgtttccaccgctccagtggatggccgattgccatgagaaatccccatccaattttaaatcatccgaacttagtgcaccgtgcttttggatatgagcccgtacttgggtagtcaacgcttccatttcgggataacgttcggcatgttgccttgcggcttgcctgtatcgctcaaaatacggccagtcctcgacagagataatggctaggttcttgtcgggataatcgacaaggcttctatcctcatacagcaactcggtaagcattcccttggtaaatcccttgattcgcgactgtagcaccaattcggcgttttttccacaaacatcgatggggtcgtattgaatgcaactgacctgccgagcaaagtccaatacaccctgcttttcactaaatttatattcgcccaagagtccatgcttcagcaatagaaattgccgtgcctggcggtttgttaattggatcatgtttgcacctacctctaatttaaatgcaataccgaactcaaaccaaccaatcagccgcctattaaagactctaactttgaggagccactaccaaggaagacatctattcgttattgcatttcttttgttggacccatcacgggtggtactggtaagcctgcttgacgtaatagcaccgtcatttggccgcggtgatgtgtttggtggtcaattaagaaacgtaataatgaaccttttgttgcaagactttctaagcctgtttctgttagcaagtccttatttgatagcttggctacctcttccttgaccgcctctgctactttttcgtaagctgctacaatttctcttgctgtcgctggaactggctcatcttgaccaatcattggtacagttaaacctgctaaatgactaaaataacctgttgtttctactaaatgccagcctaaccaaccaagtgtactatgcccttcagaaatactttgtcctaatttgtcatttgttacggcttgtaatacttgcaatgtccctttcacagccactgcccattcctttaaaaaatcatccacttgtcgatacattcaaactcctcctctatcattcacgtctcttgtatcatacaaaatatttactcaaaagaaaaggaaaaaacaaacatatgttctcgttaaaaaatgcggctaaacttaactggcgtccctattaataaaataagtaccgaatttatttttgtatacagaacatcgagctatttgagactcttattatctaaatatacattttgatatacttattacaattgaaagttcctatactggcagcactttaattttcgacttgaagcccttacctaatacttcaagccaggagttacctgaaccgcaatttgtcacctattccagtaaagaagaaatcactgctgcgcgggaattaacaagtttcaatacatcgatgatccgtggtttaacttgcttccagatggtattattgaggtttttgcgaagcaacaaaatgtatatttcagtgattcctcttagtagcagacgaaacagataagctgtactttatgaaaaaggatggatccgactggcgtatcttatctgttacaaattagtatcttacaaaaaaagaagccttttctttatcagaacgggcttctttgtgcgtttcgcgatagcgattaatttcactgaacaccaggcgcgttttcattcgtagttaaattcgatcttttcttctttcttggctgccctttccaggacagataagtccaaatccgtaggatatactcgacaggtccattgctaaatttcttaagatatagcggactgagccacaattgaataccgtagacagcaagcgcaataattgctcctatgaacacgccagcacttccaaacagtcccaggccatatccatagaaaattgttgtacagattacgctctgcatcagataattcgtcaacgagagacggccgaccgcctcgaacctgcccatcaggctgaaacggcggtttcccgcatacaatagcgcaaatgcgtatatgtatccgagtgcaagcaacgctcctccaagcgtccccccgattccgattccgagccaaccttccgcacccaattgtggcgccaatacaccgtatgctttgagtatcaaacctaccggaatcaataatgatgcccggcgaagatatatagctcgcatcgtttggggatcgctaaacgtgcctattctggcagcgtgcatgccgagcaggaacatcggcaccgtcatgagtggtgctaacatcagggctatcagggcaaatgacagttccaaatccccgccgaatggatcgccgttattactgaaattcctgatttccgcgtatgtgccgttgccgtatacatcctgactttgaatgatgtagttctccatatgaatggactcaatcgccagcgggttcatcggattagatgccgggagaccaagtatgcccgatcccatgagtagcagtaccgcccatatgagcagcgttctgggcttccgattaaggaacatgagcaagaagaaaccgagtacaccataaaatgtaaggatatccccttcccacagatagatgatgtgcagtaatccgattccaaacagtagtagaaaacggcgtgccagatgacactttggtcgtaaatctcgtgattttaggctttccgagagcttaaccattccaaagccaaacataaatgcaaaaatcggcataaaacttcccaccacagtgatcagcaggaatgagaggaaagcctgatctgctccgccaatcccgaacagttggggtttgctctggccatacattccatattggaaagccagcatattcgccagcacaatgccgaccaaactgaatccacgcagtccatcaatgacttgaacgcgcttttttgatgtgctcaatcaatcacctctgtctataacataaagatcagatctaaatatacgttaaatccttccataatttcaacataaattaataagcgaacgtttatattttgatttaatttgacgtaccaataaaataaaaaaagtcgctaaatttagcgactttcagtttgaacaccttaaagagtgacaataatcggaccatttttagtaagaataatggtatgttctatttgagctacatagctgtttttagtaacaaaggtccacccatctccagtttggactacttcttcttctgaagttgagataaatggctcgaatgcaataaccataccttcttttaacaattcatcatccgatggatcattataattgtagatgtggtcaggtgcttcgtgtattccacgtccaacaccatgtcctgtaaggtttttgataaccgttaattcatgttgtctagcagtttggaatacggcttttccgatcccgctttttttggaacccggttttgcttttttaagacctgcttcaaatgccagtttaacaacgtcgcatattttcgttaacacttcttcaccttcgcctacgacaaacgagagtcccgtatctgcaaaataactgttcttggagccagacacatcaatattgacgatgtccccttcttgaataacccgatctcccggaataccatgtgccacttcttcattaacactaatacaagtaaatcccgggaaattatattcactttttggagcagaaactgcgccagctttctcaaaaagctctcctgccaaatcatcaagttctttagtcgttatgcctgggatggttctttgaaccaattcatctcgaatagaagccacaattttgccaatttccttcaagccattaaaatcttcttctgttcttgcgatcattttttcttacctcactatcttttatcattaattgattacataagtgttatctttgattgcacattagataatcatatccaaagcagcaaagcttcgcaactattttatcaacattatgagtgtggttattctcttgtaccttcgtattattgaagttcaattctccatcccttcatatattctgcgccataagtgagggtatagttttgaagtagttcttgtatggtggttatctgttctagaatagcgttactactagtcctgacgataaatacaggcaagatatcgttttccctgaattggttgagcagccatgtcaaaacttgaaaatcgtcacggtttgcattatccaaagtttcttcaaatcgaaaaatgttgttggggcttacgttattttcctgaaggatcttcttgagatacgcatgtgaatcgccttttactaattcagatagcttgatcaaatatggagaagttgaattttgttcatcatgtccaaatatatcgatgtgaatccatttatttagttcgctgtttatcgtctcaggaatttcaaataatctacgatgtcttgcaaaaactaatgctggatcgatgatttccctacagtgatctttcatctcctgtttctttttatgttgttcacgaaatgctttcggtccttccgagaaaatcttattaaatcgttgataaaaatatctgggtgaagaaaaaccactctcaattgatatttctatcagacttcgatctgtcgtcaataattgtttgattgcatgctcaatgcgcaagtaatgaagcaagttttgcagcgtatctcctattaataacttgaattgtgatgataaataatccaaatttaaataatcctctgtgtgcttggcgatctcattcaaagatgccttgttaataacccccctattattgaataagtaatcatatattcttcctattcgttgtagcttggttgggttcccttcgaacattcttttcgcatcaaaattcataataagcaggtccaataactgttcgactgtattctttaacgttaaaaatggcatctcactcttagttacaattggagttattaacatgcatatggcctcaatgattccttctgctcgttctaaacctagatatgctccagggctaaattcatgcgcaaaccagacataggataaatcagggtaatattcctttgcaaatgcagcatcgatatttatttggaggacgacattgttttcatcggtctgccatagacggtgaacttgattgataatgaaggattggggagatatgaatgaaccaaattcaaatcacacagcagcttaatgcacaacaacaagaacaagttgctcatttattttacgaagcttttccattgaaagtaacacatctttggttttatgcgaaaatgaaaaaacaagcagtaacactattagctcagtctattcaatttgaacagggcatttacgcattaagaaatgaagaagtagttggatttctcggttacaatataggaaaaaaagcgttcacacctgccaattatgcagcttttcggaacgtgtactccccagtggtagcgacttggcgatttttattttatgcgttttatttgaaatttcatttgtatcacgaacatgtattgcatattgaccctattgccgtatctgaagaagcacgtggtcatggcataggtaaattgctattaagtaagttggagcaagtcgcaagaaataagcaaattactataatcaatctagaggtcgtcgatacgaatccttcagcacaaaaattatatgagcggttcggttatatgcttaaaaaagaactgaaatcgggcccgtttactgccaaggcaggcttcaaaaaagtgatatttatgcaaaaatgcttatcgagcacccattcatcaatcaaatcagaataaaggaggccaagcggatcttgtgtccaagttaataacagcaaccgtttctttaaacgctctgatgacaacataccgatttcttgctcaacacgcttaccatctttgaataaaatggttgcagaaatgctcataatctgaaaacgtgacgggatttccactttgtcatccaagttaactttaacaataacaactttaacatcttccgtgttttccttagcttaaacatgttccctcctttcattagtgtgatggaaacatgggaatggattataagaagcttaatgaggatacttcgaacgatacagacgaataggattaggacagtagaaaacgagcgcatccatgtttaggatgcgctctgaactagctgttcatggagatgcttttggcccattcagtgactcttcgactactttcttcttccgataaatcttcaatccgggtaagaatagaccagcgtacgccaaaagggtctagtatacttccgaatcgatcaccagacgcaaagttaataatctcttctcttactttcgcccctctggatacggcggttgcaatggtttcatccacattaatgacataaatccctaaagaataacatgcatgatcttgatctgggggcaaagccaattgatatgccgggtttgcagcccccagctgtaaaaaaccatttccaaaatctaattcggcatgaacaataatcttattacgatttccatctggatgctcagtgatatctttcacccttgcattgaaaacaactttgtagaactctattgcttcagaagggtctttcactgttataaatggggtaatcgatgtaacgccgttaggtgtacccttgtttgtatattttcctgatactgccttgtgttttgtctgttcactcatatgtttactccgccttccttttcagtaatccgagattgtcaacattataaaacaacttcactgacatctactgtcagtgaagttgttaaagttgatagtactccattaactcggatacaacagcaacaagtctgtccttcaagcgctgtggttcgatgacttgaatggatctcccataggataggagaaaataggggacgtatgtatcaattgatttttcatcaaataaaaagatggcttgattagaagtccgctctttcagataatgtcccataaaccaatgcagccccaagtcatccaatgcctctgatcggcctttgataaccaaggagattaacccctctttgccccctacatcaggtaataaattttgcagaaaaaattcacgggctgaaaaggcttccgaacgcttaaagcggagcggagtaagcttgattcgcagaatacgatctgcccgaaaactgcggaattcatttctcaagtggcaaaacgcaatggtataccatttattattccagtaaaccattccatacgggtctattattctattcttgggttgttcttcacggcttctgcgataatcaatttcgacagagcaatcattagccacggcttgctccaattccgccaagatcggctgaacggatggatctcccatgcgattgataacgttaaacccggctaaatgacggcgaagtgtattttcctgatcctgatttgtatacattttcaatttggatgttgcattgtccaatgcctcactcaaaggatatccagcttcttttgcaaacacagcagcttggagaagtgcctttttttcatcgatatcaaataacagaggtgctttgatatgctgattcagcaagctatacccgccgttgtgacctgtatcggaaatgatcggtacaccactggcacataatgcatcaatatatcgatatacggttcttatattgatttctaacttttcggacatctgttttgcagttactttggtgcctgaattcagcatccatagaatggctaacatattatcgttctttggcataacctgcatcctcatcttcagttcattattggatatctctacattatatcagtacagcatattttacataaaacaacttcgttgggcgatactacctagaaatatattctccggtttggagcgaaggccaatgaagaaatccacaactaatattaatacctccgaggtcattattgtagttatcaattcaatactcggagctggaattctaacactccctcgcacaattagtaaagcagtagggacaccagatgtttggatttctgtcattttatcaggattaattgtaaccacaatcagcatcctccttgtaacgttgtgtcgtagattccccggtaaaacggtattcgaatttatacccgaaatcacaggtcagtggattgcttatctattgggacttttaattatcgtgtattttgttgttctttgttcattcgaagttagagtcatggccgaaattacaagtatgtacatccttgagcgcacgcctacttgggtcaccattatggtcagtttgtggattggtatttatatgttaacgggtggtcttaaggtcatcatccgggtcttttcaatcgtgttgcccgttacgcttgtgttgttagcgctggttttccttttaagcagcaagatgtttgaaattaataacctcagaccactcctgggcgatggattcatgcctgtgttgaaagggcttaaaccttcgtgtctctcctattctggatatgaagttttactcatcatcacagcttacatggtagacgtgaaagcaagcaataaagctgctatatacagcatacttagttgtacgatcatatatttggtcacgattgttaccgttgtaggaaacttatctttgccaggaattcaaacacgaatgtggccaacgttcgacatggttcgaagttttgaaattgaggggtttctttttgagcgatatgaatcgcttttcattgtgttttggctgatgcagatctttgcaacctatgcttttaaacactattttgcggcaatcgggatccgagatttgtttcgtctcaaaaatattacgagcatacaattcgcgatgttgccagtcttatatgtaattgcttacttgcccaaaaacctggaggaaacattagctttgggtgattttcttggcaatatgtccatttttttgtttggcttgttacccctgctactgctgatcattagttttgttcgtaaaaaaggcgggaagcaggcttctagtgaagcacttaaggcaagctgaatgtttggttcttattgtatgtagacagtaaaaaagaaaaaaagccgctaaaatagcgactttaatgggagtatattttcttcattatttattaaaagtaaccttttctgtaccgccttcaaaaatgatggacgtgtcccgcggcttcgattccgcaattttacggccgcctctgtaggaataaagtacgccggcttgtttgcgaacagcctcatattcgttctctgcttcaagtacgatgaagttagcaggtttaccttcttcaataccgtatacatcctcaatgtgtaacgttcttgcgctgtttttcgtaatgaggtcgatcgaattcacgatctggtcgtaaccaagcaactgtgaagcatgaatccccatgtgcagtacttgcagcatgttgcctgtaccgagcggataccaaggatcgaagatgtcatcgtgaccaaagcacacattcagacctgcttcctgcaactctttgacacgcgtcagccctcttctttttggatacgtgtcgaagcgtccttgcaggtgaatattaaccaacggattggagacaaagttcagatcagccatcttcagcaaacggaacaatttgtacgtataagcgtcattatatgaccccatcgctgttgtgtggcttgccgttgttcgtgaacccagtccacgttcgtaagcttccttggcaacaacttcaacaaaacgggattgctcgtcatcgatttcatcgcaatggatatcgatcagacggtcgtatttttcggccagatcaaacgcaattttcattgaatcaacgccgtattcccgtgtgaattcgaagtgtggaatgccgccgaccacgtcaacgcccattttcagtgactcttccagcaattctgccccgtttggataagagtgaatgccttcctgtgggaaagcaacaagctgaatgtccatatatggagccatttcttcttttacttcaagcatcgctttaacagcaatcaagcttggatcggtaacgtccacatgggtccgtacatgctggataccttgtgccaattgccatttcagtgccgttttggaacgtgttttgacatcttcatgtgtcaagaaagccttgcgctctgaccagcgttggatgccttcgaacagcgttccgcttagattccattccggctcgcctgcagtgagcgttgtatcgagatgaatatgcggctcaataaacggtggcagcacaagcgatccgttaacatccaggatctcttcattctcggtcacttccagcgattgtgtaattcgttcaaactttccgttcttcacaacgatattccatagtccttctttaccccgcaattttgcgttctgtataatcatttattttccccatttctttggtttctttggcaggaacaatcagcatcaagacgatataggccactgctgtaccaagtagtgcgttcaatggtgttacgccaggagccagttgagcgaatgccacgccgatggcccaagccaccatcgctacccagtttacatttttgaatgacatgtcggcaaatggcttatagtttctacgtttcacaatgaagtaatctgcgataataatagccccgatcgatggtaccgccgcccccagtacgtttaggaagctgacgaagttgttgtacatccacatggcgaatacggtacccacgataccgtttacgacgacgaagaatttctttgagattttggtgatgttcgcaaaaccaagacccgaagcgtacagtgcattatcgttggttgtccagatattcaggcccagaacgatgattgccgggatgatcaatccttgcaggaacatgacctccgagatatcagccaggttataagccattgcaccaactgcaccaaacagaaacatgagtgagttacccaggaagaatgcaatcactgttgcggtaactgcctgtttcgatgtccgggaaaatcgggcaaaatcgggtgtcagcgttccgccgcttatgaatgatccgatacagatcgttaatgctgccgccgcggtaagcgactgagtcggtgtgtaatctaacaacccttgcagaccacccagcgaacctgcaccttcgaacatggagtaaccaccgagaatggcaatcgcaggaaccgcgatatatccgagaatgacgagtgacttcatgccaaagatggctgatgctgtcatggcaagtccgaacacgataatcaacaggtacacgttccagtccatagctttggcgaccggaatcgcgaacatggctacgcctactccgaaccatccgacttgtgtgaatcctagcaggaatgaaggcagatacgacccttttgcgccgaacgcatatttagcgagcaaatgtgtcgacaggcctgttttggcagcgatatgtgccagtgcccctgtgtagataccgagcaccagattacccgcaagtacgatgccaatgaactccataaacgtcaagcttactcccaacgtgcctcctgccagcatgcttgctgagaaaaatgtgaaaccgagcatgacggataacgtcttccaaaagtggtttctttgtgatttcggtacagcttgccatgaaaactcttgatcttgtttgctcatcagaatacccccaacgtaaagtgtatctgataccaaaaaaagcagaaaaaagaggctactcgtcaagttatacactgacaagtagcctctttttgcatcataatccgcgcgaagacacagagcatcccatgacgggataagccctgattctcgcgtgattatgaaatccgctgcccttgccagcctctctggactgaattaaaggtaccagtattcaattacatactattattttggaaaaacctgcagttgtcaatgtcattattatccaaaggttattaattccttatacagcaagctgtttttttatcattcctcaataccagtggctggagcaagcaaataataatgtcgagtttacgatatgtgtccaacaacctctggtaatactctttcgtattccttatataaaacataacgattaacacctctggaagagttaagtgcttcatgcgcgtgctgaatagcagtatcgcggttttctgctttgagttcaatacccgcgagcaatgttgatcgcatccactgttttttaatggattgaagtctttcacgcgcatcttcacttttcccgtcttccaagagtagaatggtttcgtaatatgtacggtagtccgataagccgatatgaggtacagcttgccgaatggcaaacatatccttgcgatataatccgtaagctgccttgaactgtgcttgtgttgttcttcgcttatatttctgcataatctgctccataactagttctacctcatcatcaagtctgtttgcaagaacgtaaataatgtatgtcccaggtgtattttgctgcttggataaaaaggactctaaccgatctatacgcttatcaaatactaaaggataaaaaacatgcttaataaacgcgataagaatggtaacgacaacaccacctattgtccaaaatagtgaatagtcattccaggtcataaacaaaacaaagacaaacaccgccaaataaaagacgaattccccccaagatttactcatatgtatctccttcgaatagaaaaataaccagcaagtctatattatatcaaatttaattcccctttttgtataatcttaggaaacaaaaatcacgaagaatattctatctgtcgcaaaatcaagcctgactagatttactgatacaacaaaaaagccgctatattagcgactttcagttgaaataattgaatttattattgtgcacttaatagttcttcaaaagctttaatgttcgtgtcaaagtgagggacggtttgagtttcttcagcagatttaaccagttttacaactaaatcattataaggtgtcgcaattccggtaccttctgctctacttgaaacaaccccattaatataatcaatctccgttttgcggttcttctccagatcttgaagcatgcttgctttgagcagtctggagggctccatcacgtaacgtaatgttttcacccgttcagggatatcttctttgctgttcagttcgagtgaagcgatgtcgaatccattcattttaaccaaggtaaccccattggcgcgagcaactttaatcgtctcgtccgcaatatgagctgcactcacaatgccggcttcatgatcgataatgtctccgtattccccattcaatgcagcggacaaaccactgaatgcattgttgatcaacaatttggaccatttggttccaaccaagttatcggaaatatgtgttccacccacaagatccaacaccgatttcacgccctgaattcgttcggtgaactcaccatttaattcgccaatctgaaaagcgtactgcttaaattgagtgtactcggtagtcagacttgatacacctggttcaataaatgtagcaccgaattcaacggagcctgcaatgacacgtttttcacccacaatggacgccactttttcttccggaatcccgttctgcaaggaacacaccatactgtcttctttcaagaatggaagtaattcctgaagaatggaatcgttataaagttgtttggttaaaagtaacacgaggtcatattgtcctgatttttgatcaggagtaattgcttttactttggactgaaactctgtggtacccgtcactttagcacccgtctgatttaaagcatctacatgttcttgatatgcatcaattaactcaacgtcaagtccaccatccgcaagatatgcgcctacgatggttcccaaagatcctgctcctacaattgcaattctcattttatttttcctccttatttttcttccaggtagttatatacaggttgtgcagcgtttaaggttaggttggtaaggatatgagaagcggacaccacttccaacacaggcagatctgcaagaggagccaacgcatgttcgaatagttgaagtcgggcaggtcctgtccaagcttccttcacttcgacgtccgtaatttgagtacggatcagatcacatattcttaaattcccgctatagtctgtagcaatcttaatcataaaattaggtcggcatatttcacgtttggcgaactctttatccatctccacatgtttatatcccatcgttgccgtggctacacgcaacgatccataatctagtgtgccaacaagtgtatccgaatcggtatacaacttgggtgcgcccagctttttcggataggccgtgagctctcgaccactcgcaatcgcggggaaattgtctacgtacatcgaatgcacataatcaccttcctccccattgaattgcacaggaatgacttgtccagcttctgtatatgcacccagtccagaaacatctggcatccacatcacttcgaatttaaccaaaggttccgtaatttcgagaggttctggtacggctgctcgcaacgctttttcatcagttcggtaaataatattcaagtattcacgattcacgaatttgtacggtggcattgggtatgccggagctgttaggggtgtattcagatttttagctatgttattcacatcgattttcatcaaagacacctaccttatgttttggttctatataagttgaattaaagattatttacactgacactacgatgacagaacaaccttccaatcgctgttatccccagatttttcgattccccttctaataggggaaaatccggtgatagcttatgcttccgatgtagctttctttcagaaagcttttaggcgaacgcttcgctttttcaggttttttctgtcctctccgttattgtgtaaatgattagttcaacttatatagtcaggtttttgttatttaaaatttgatctgtatctcataaaaaaattctacatcaatatttaaatttaatataatacataataagtactatatatatttatcagaataaataaggagtgcagataaatggaattgcttcagctcaaatactttcagaccgttgcctatactgaacatatctccaaggcagctgcccaattgaatattgctcaaccttccctaagcttaacgattaaaagacttgaggatgaactgggtacccccttattccacaggagaggaagaaacattcaattgaattcctcaggtgagattttattaaagcatgtaaaccggatttttattgaaattgaaaatgcagagatggagattaaagcggaggaacagcaaatatccaatacaatcaggatctcgattacgaatactcggttcctcacaggtctcattagtgactatatcaacggttcccctgaaaccaagcttcatcagggtattgggacccgcagtgaaattattacaggtttgaagaaaaatgatatgcatctgggcattacggggcatccgattcaggatgaggagattgagagtgttgttcttgttgaggaggacattgttctggttgtgcccacggatcatgcatacggcggagaaacaagcatttcattaagtgttgttgcaaatgagccctttatttcccttgccgataataaggagtacagccgctttacaactatgctctgtgaaaaagcaggtttcctccccaatcatgcatttgaggtcgattctcataccctgcttgaaattatcagccttaatcaaggtgttgcattaattccgatctccgtatgtagagcactggggttacgttatgtaaaaattgctgatgattcagccatatatcccattagcctctcctgggtcaaacaaaaatggttatctcctattgttcgagaatttcgtgattttattacttcgtactatgaagaccatgctagcttgtttaaagtggagtaggatttcttgatacatgacaaaagataaaaacaaagaccacgttagtcccatggaaggaaccgacgtggtctttgatcgttatcgttcttagttatactgcagtctgtccttatattaaatgtccggaatcatcttacgctccagctccaacaattcatggatgatcttgtccgcgtcgctgatggaactcacgagcgggtcggtgagcatcgcccttctcagcttctcgtagctctgttccagaacagcttcaaccgtaagctcatgcgtatccagtacaagttcttgcatccctcttatcccacgcggcatttcgcctacatggagtggtttcgctccatccatatctacatcgcatagtaattccaggaacgaatcgttattcatattggttaccgcaccttgattgagcgtattgatgaagaattttttgcccaagtttcccaccatattttcgatgatgtcagtcgcatgatctggtccgaaggtgctcatataatcggcaatcgggatgttccctgcaagaaagtcatccacctgctgccacatctcatcgtgacgctgatatctgtcctctgtctcccagatcgataatgggggaatcgtgtccgcagttttgccaagaccttgccaataccgaacgtattcctttgtatgcgccgtacaagtaggaatgattccgaaaatatcatacagttcataggtaattgcatcgttaaaaagagcttttgcgccgcgatcaccgccgttgttctcctcacctgccagcttgcgcatggcttctgcaattgtgggcatcacattttttccttcatactcggctttgagcagccaagtgaaatgattaacaccagcgatacgaaaatcgaatttctgattgatctcctcagtgaactggctattgtttcctatgattccggctcttacagcgtaataggcttttttatgtggcatatgatgactatcgcacagcgcaaacgatttaagcttcggagcatatcgatgtaatgcgatgccatgaacggtagacgggttaatataattgatcacccaagcatccggacataactcctcaatgtccttggcacattccataataaccggcagttccctcatcgcgcgaaagattccaccagggccaattgtatcgccggaacacatacgaattccatactttagagaaacctggcagtcaatgccccgatatttcaccgattcttccgcaaagctgagcacaacgaagtcggctcccggtagtacctgtcttcggtccactgaaccctcaatctttagggatacgttgttcttcttggcgaccatttccgctagttttaccattttcgagagcctttcctcgtccgtatccaccaaagccagcgttccctgattcaaatatggggagtgtaccatctgccagatggactgacgaccaaaaaacaggctgcccgccccaataacaactacctttggatgctgtgtacttgtagcattcatcaataacccctccttttaacgatataagttcattataggtgagtgggctggaatcggaatgtgtgatagttttcaaaacatgtcatatcgtacgatagttaacaagagataaatcctttgttatgatagtgaaatataaaggatgtcataaagtcgagaggactaggttggattagatgcacacaggaactgtaaatatgagtataatcgatgaactttcggagtatatcacacttcgcatgagctcttatttggaacaaacacacgacagtaattggacagagcacaagtctcattccgattatgatctgtggttcattacagctggctccgtactaattaccatcgatggaatcgagcatacggcgaacccgggtgacgtcgtgtttttttatccggatatgccctacacggcttccacgaccggagagttgtgccgattcgtatacatgcactttgatttcagcatcgctgagcagaagcggattctcagcgagtttcaactcccgggcattgtacctggcaatctgattcaagaggaatcaacgctgttcacctcgtcctatcgaagattcaaacagagtagcggcgcttccgccagtccactttatttgaaagcctctctacttctcgtcatcgccaaaattttggaattgcataggcaaggcttatatcacggtgagtttctgaaagacccaaaaccgaggaagatcaaaggaagtctggaagttctgcaaaatgtcttcccatacgtggatgcgaatctgcatcgtgccatccgaattaacgaacttgcagatattgccggcgtctctgagaaatattttatttcgttgtttaaaaaaattctcggtatcacaccggggcagtatatcaatcagatcaaaatgaaccgggccagagactatctgtatgagaaaaaatatacgatccagcaaattgccggatttctgggttatcccgatccctttacgttctccaaagcattcaaaaaattctacaacgtgcccccttccaaattcgaataaaataccgcagacaaacaaagaggcaaccggtcgatccggctgcctccccacttgatgaatccttggttattcagggtttagtttacgtacaggtcccttcagcgtccctcatactcaaaaggagcttcagtggaatacatctcatggaaaaatcctttatacggtatatcctcttccagacatttaatgagatacaacagttcttcgttagcttccggttcttcgccagcacactgcatttcctcaaattgacctagaatattctccaagagagtgacttgaataaataaaggcagcttctccagcatcgaatcttcgatcttggtttcggaagtatatccagcgagggcggtttggaaatagtaatccatgaactgtttgcgtttatccgcattcggctcaaattgaatccagccgacgccatgtgtccatagatctgccagatcatacatataccaaccgaagcatgaattatcaaaatcatacacggtgatctgaccggtatcaaaatcgattgagtaattcccatcgttataatcaaaatggatcatgccgaatgtctcttggtttgtatccaaaccgtctaaggtattaagaagctcaaccatcttctccttaagcagagaaaatgattcaggtaccaggttatcgatatattcaccgctgtaattgtcaatcaaatgatgccggcgatggacgggagtgtaccctttcgatagctgatgcattctgcccagaactttaccgctattataatagtattcgctaagtggaacgccttcccggtactgataatggttctctaccagcaacttccctgtggccttcacaaacatacagataaagaacgtatgctcaccataagtgacctcttctaacagatcgccctttttcgagctgactacattcgagacacttgcaccgtgctcaaataaataccggacatactccagttcggcaatgtaatcttcacgctttctgtcaggcaaaaaagacactcggagaattagcgattcacgtccctcttgctcacaggtgtaaacgacattccgtccaccctcatgaggcggaatgagctgaatgttctaaccctccaggtcaaacaactcggataccaatgccaatacatgtgtattgcagatgttaacagcttcgttaaaattaataataatctcctccagtaaacattgtttggacggtttcccgcactgcaatgtccacaaaaggaatccctgtaacgcaaatatccttctgtgaacctaaagcaaaatcaccttgttagacatttaaaaacgctcctttttgttcagatggttacatcttatcctaatattccacattttactagccaaatttataactcagcagcctcgtaatagtaccgtatcaaaatgtcctgatcgtagttgccaaaccctttcccgaacaacgtaagtccgcctcgaccgggcaccccttcttccggtcttaatccaaacgtccagtaagtggatgaatccagctccagatcatggatacgcacatctgagatgcgctggctatccataaacgtcccttctccgttaatacgcagcaccttcagtacaccatactggttgacgtccaatttccaccataacggtgtatgtttgcccttccgatctccaaaatcccctgggcttgtccaggttccgaggtgatgaccattaagggaaaaacggatgtcagaaggccagttttcattaacttggggtgcttccgaactgagttcgagtgaaatttcaatttcctggagatgctgttctgtattcagataattggggatcttatattccagaaaaccttgtgcaaaccaaagaatacctgcattgacccgatccgggtccataaagcaggcaggcgtgtcgtactgtccaatcatctgcgtagttgtcgcaatcccgcaggtcggccatgcttcataatctgtatattgacctaccggaatagagacttcatgataaggagcatcaactggttcaggggagagattgatagtcataaattcttgcagaataaagcagtatttatacgttccaccgttctcacgcttcatgcggctgcctacaatgcccgctttctgcaatttgctcacgtgtgtactaacgatggctttgctcagatacagctctttggcgagcgcattgatatgcatctccctgttttgcaataataagcgaacgatatttaaacgggcctcgctggcgagcgcctcatatatgatcaaggatgcggcatccgtgccaagcatcatgaacttcacttccctatctctatagaatccataattattgatttaggattcgttattttgcgaactcatcaaaatgaacttgctcaatatataagcattatgatacatattagataacaaatcaatgatttgattttgcttttaagcgaattcaataccactgttgattcttttaaaaatatgaattcatccaatggaggtacataccatgcttacatccaaaatgcttatcgataaagactttcagattgctgaagtagatccgcgtgtctatggttcatttatagaacatctgggacgggccgtatacggcggcatatatgatccaggtcatcccaccgcagatgctcaaggtttccgtcaggacgctattgaagcgatcaaggctttgaatgtacccatcgttcgttatccgggcggcaatttcgtatccggttacaattgggaggacggcgttggtccggtagcggagcgtaaacgcagacttgaactcgcttggtggacgattgaaacaaatgcggtaggaacaaacgaatttgcagattgggccaagctggttggaaccgaagtcatgatggctgtaaatctgggtactcgcggtattgatgcggccagaaacctgatcgaatactgcaaccacccatctggcacatactggagtgatctgcgtatatctcacggttacaaggacccgcataaattcaaaacctggtgtctaggcaacgaaatggacggcccttggcagattggtgcaatgactgcatatgaatatggccgtattgccaatgagacagccaaagcgatgaaatgggttgatccggatatcgagcttgtggcatgcggcagttccagccgtgacatgagtacatttgcagattgggaagcaaccgtgctggatctcacctatgaaaatgtggactacttgtccctacatcagtattacaacaataacaaagacaacacgtatgacttcctggcgacatcgctggatctcgatcaatttattgatagtgtggcttcgatctgtgattttgtacaagccaagaaacgcagcaaaaagaaattaatgctgtctctggatgaatggaatgtctggaaatccatcggcacaagccgtatggaagaacggtggcagattgcgcctccagagtttgaagatgtgtatacacatgaagatgcactagctgtgggctgttatctgattaccatactcaagcacgccgaccgtgtaaaaatggcttgccttgctcagttgattaacaccattgcaccaatcatgacggaaaataacggagcaatctggttccagacgacgtatttcccgttcatgcacgcatccaacttcggtcgtggtacggtgttgcgatccatcacaacttcacctaaatatgattccaaagactttacagatgtgccttatctcgaagcgatcagtgtgcatgatgaagagaacggcacgatcacaatctttgcggtgaacagacatctggatgagaagttggaactgaatgtggatctgcgttccttcggcgaaaccacatttgtggagcatatcgtattggagaacaacgacttgaaagccaccaataccaaagaaaacccacgtaacgttgttcctcacaacggcggatatacaacggttgaccaaggtaaagtgcaagcagtcttgaacaaagcatcatggaacgtgattcgcctcaaaaccaaacaggcttaataagagcgggatagagttttctcctactctgcaacatcagcattgtttttcgcaccgcgtgtagctccctgcgcgcggtgctttttgctgtatgatggcaaacggcccaactacatagttccaaagttagaagtgtggcgcgtatttgaaacctcattttttattcctcgcaacgaacgaatttaacgaacacagggagtcttatttaacccgtttcgggcgaattttaattctaacgaacacaggagaagctatgctgcagaatcagccccttttccacactatatcttacattttgcagcaaatagggtgtgtcatgttcgttagaattttaatagcttgatattgacccgaatacggtttctgaggttcgttagcgctgagcaagcatgcgaaatcgagctggttcgaacctcatatacagcataagcaaataagccaccctccgtttggcgtacggagagcagcttgcagtgaagcatctagcgaagaagctgaaacagaacagagaagaagataaggaacagatcagaaagagatcaaatcacccaacacactagcaatgcttccttcccaaatgcaacgaaggttgtgttctaattcacgattttcatttcaagtattatccttgttgtgcttcctcttcaccttcggtttcagcctgagctgcttggcttgctggagtcatcagcccttgaactgcccccataaatggctgaatctgcttaatcatgccataccccattttgaccacaggtgtaaaccgctggatcatgccaaacaaccgcatacccccgcctaacatacctccaatcgagcctgcaccgccaaagccacctaacaatgagcctagcataggcatgaaagatgatacctgggcttgcctagacgttgagcgagacatcgaccgggatcgtacttgcgacttacgtgtgctgttcacccgtttacggtttcgagaggatgctgtttttctcgtagcccctgctttaggtttggttttgcgagcactgccttcagatgagggtgctgtgattgcggtctgagtaagctttccgcccccggtaagcactacgccttcgctgttaacaccagagatgtacccgacgtacgtctcgccattatgaagagtcacgcagactgggcgatccttgagccgtttcacccggacgtgtatttcattggttttagccatggaattcacctcacttgacttgatctacttcagtctacgcaatgggtggacgacttgcctgtgcgaataacacatccgtgtgccgaaagcaggaagattctgacatggctcctgtctcagatatgctcaatatatatctcattcaaaatatgacccatacgatatgtgtgctctgccaattcagatttcacatatgattcaatatcactcttttcgatactgtacaagacctccatttctttagaaaaaagaaggtgtccctcattgattttctgttccaacgaggttatctgtttgggtttcagatcaccaccgaacacctgctgaagtgcttgtacatatgtttcaagcgaacgggctccgacaattttcataccctggttctcttcattcacaatgataattgatgggaaacctctaacgcccaaactagcgacattctcaaagtcttcctctaataactcttgtgcagattgctgcgcagccgcctcaaccacttctttcccattcaagcccagttgattgacgatatccatcagcacatcatcttctccaatatttcgattaaatgcaaacacggcttcacgcgcacgtcttaaaaagtcctgctctttaccagggtgcgtactctgaatgaccttaaatacgcgagatggcggataggaagaaagtattggattatcgtgccataaggaaccgtcgataggcatgcgtgaatgttcacccacttccttccaatgctctgcaacatctgaaggtttttgaatcccgttagcgccatccgagaaaccattccagttagccagtagcccacccattttaatttgcagcgtaaaataatgaccgtattcctcaataaaccgatgaagcacaggctcaagcgcccagcagtgagagcagatcggatctgttgcgtaataaagagttatccttttctcaacgtgattcagattgatttcttgcatcgcctcttcttcgctcacaccacatacgcctgtttccagatcacacatcatagattcgttactcacgtgtatcccgcctttatattgtcttatgaattgattttcttgtgttagtttgattataatgtctacaatcttctgaacaagtacgattctttttctgacttagtatcaaaaagtatactattggagggtaccaagtgaaatacgactttaattttgatcagttatgtccagcgacttatgcatttcaggtcattggaggcaagtggaatcttccgattctggcaatcctcagtgaaaatgactgtatacgttacaatgaattaaaaagaagactgcctggcattaccgggacgatgttaacgaactgtttgaaggatttgattcattcgggcatcgtgcatcgggagcaatataacgaggtgccaccgagagtggagtattcgctcacagaatcaggcaaggaattggttcctttaattgaatccatggtaatgtggggtcagaaaaatatgatagcaggcgtgaagcaacaagaactataactcctggcctaatgtaaccccttagcatagatgttcattatctaatcgctctgcacaatttgttcaacggcaaaaagactatttcactggaccatcaggtcctttgaaatagtctttcctttataaatacaagacggccgcttgtttacgacgtgtacacatctaactattcaggtcgtcatcttcctcatttcctaaatacataaccgttttttctccctcaaccaatctaatgatctgctttcgtaattttgcaggaaataaaggtagttcgtatatatctttaatttcaagccattcatattccacttgattttcgtcatttggcagaatagaactatcttggtccatcaaacctatgtactcgcataaaaaaacaaaatctacacgatgaagagcttcaccgtataccccttcaatgacaaattccagtgataacggttctacatctattccgatttcttccgcaacttcacgcttcacagcatccgtcagggtttcacctgcattctggctcccaccaggcaggatgtagatgacttcatcattatcatcctgcttcattgcaagcattctcccgtctttaatgatcaatgcttttgcagaatttctaatctttctctccattgctaatcccccatatatatctgtatccatgttgttgaaggttgattccaattaacctcacgatctccatgaagaatattttaacacatacatctaaacaaattctgaacaatcaaatcaactcactcttggcgacctccatgaaagcagccatggacggagagatccatttttcccgatgccagagcatttgcgcagaaaaggatatatctgataaatcccacggcagagcaaccacttccccatcactcaactctttcttcaaagccatttcaggtaataaagcgatccctagaccagccgcaacacattgtttaatggcttctacactatgaaactccagctctgtcagagcatctgcacctttcttcgttatggattggtcaaaataagtgcgatacgaacagttcttttcggtcagtaaaaaatgctgtttgtggaagtcatcaatgaccaactcggaacgcgatgctaacatatgatcgggagaaaccaccatttgaaaggtctcatcctttaaaaactttgaatgaaggtctctggaattaataggctcatccaatacaaaaacgacatcggcatgcccttctctcagacttgatttaagctcttgcccggacaaggggcggaacaataaccgcacaccaggatagtctgctcggaagcgtttgaacaaggctggaagaagatatgcacacagcacttcgtctgctccgatcacaaccgttcccgccaattctccgtgctgactggatatacactttgcttcctctacatcgtttaatatcttagtggcgtacggcagaaactgttggccagcatctgttaacacaacctttttgcctaatcgatccagcaatttcaccccgagctcttcttccagcgatttgatttgcatggttatggtagacggtacatagctcaataattcagcagtttgactaaagctgcaggtcgatgcaagtgtccaaaaggtttttagctggcgtatttccatgagtcaggcacctcctaagttcaaaataaatgaatgatatgttcgataacgtttcgttgaattgataatagacgtaatgtagagtgaaatcaagttattactattttataaggagaatcaatctatgaacaattatgaaacatataacctaggagatacattacttcaatcggggcaacagctccctcaagcctttatcgcttacaagacctatggaaacttaaacgcggcaaaggacaatgttattgttgtcccaacatggtttgctggaattcacacagataatgaatggttaattggaacggacaaagcactggaccccagtcgttattttatcgttgtgcccaatatgttgggtaacgggttatcttcctctccaagtaatacccctgccccatatgataagaacaacttccctctcatctccatgtatgacaatgtgcgtgcccaacatcaactcatcactcaaaaattcggtatctccaaaatcaaacttgttgtgggctggtctctgggagccatgcaggtttatcaatggggaaccagttatcctgagatggttgagcgtattgccccctttggcggaacggcaaagagcagaccccatacacagttggtattcgaagcaatgatcgcggcgttacaggcagattcgaattataaaaatggtagatatgagcgccctccggttgccggtctcgcagcgatgggaagagcttatgctccatgggggttctcgcagacgtattatttggagaaattgtaccaatctgagggtttcgactccttgaaatcttatgtagaagattactgggatcaggtatttcttcccttcgatgctaacgacttgattaccatgttgcgtacaggaatctatggagacattagcgataatcccgtggatgacggcaacttcgaacaggcgttaagcaagatcactgctcctgcactcgttatgccaggatcaagtgacttgtttttcacgccagaagacagttcgtatgatgctcagcatatgccaaacgcggtgtatcaacctatagagtccaagtggggacactgctttggaatcggagcaaacgaagaggattcactcgttatcgatcgtcatctaaagcaatttttggagacataagtaaaaaaagaaggagcacaaagtaaaaaaagtgcacaaaactcattattcttttctccgctacaactcaaaagtaaaaaaagataccagttctcgtcaataacctttatatcacgttccccctttctcgtttagaatattttcaagtaagcgttattgaaatatgactgataagggggaaaagaaatgaacaagaaaacgaaagccttagtcttgtctgtgtgcatgtcaaccttattactcgcagcctgtagcaatggaagcggtgccgataaaggttcaacgacggacacggattccaacgaggctggaacaacaaccattcacaccgtaacatcagaatacacttcagcaaaatatccaaagggcgacgatatcaccaacaatgtatggattaagcgatacaaagagaagtttaatatcaatgtcaaaacagactgggtcagcgatgagtacgatacaaaactcaatttggctatcgcatcgaacgatcttcctgacgtattcagagttaatccatcacaactgagacagttagtcgaagcagatatggtcatggacctttccgaggtctttgatcaacacgcttcagatcgtctcaaaggttacatggaagcagatgcagacagttacgaatctggaaagaaggacggtaagctatacgggataccacagatgcactggggattaattgaacaaccagacttcatctggattcggaacgactggaaagaagaattgggagtccaagatccgaaatctgtggaagacattaaaaatatcgcactaaaattcatggaaaaacacggtggttatggtatagcggtagaccaatcgttggattacctcaacttgctggccattgcatggaatgcgcatccggatatgtggatggaggatagcactggaaaactcgtgtatggctccgtgcagcctgagatgaaaaatgcgctggctgagtggtcagaatggtacaagcgaggcatcattgatccggaatttgcaatcaaagactttaatgcgatgaacgctgacattgtagccggaaaagtgggcatgcagccttattaccagtggtggggttataatccgggtgtcgatacggtatccaatctgggtaaggacgccatcttctacccttatatcatccctaccgttgatgggaaagaagccaaacaatccattttcttcgccaacaacaattatatcgttatgaaaaagggatttaagagccctgaagaagtgatcaaaattttgaacgactacgcttatattgtggatgaaggcaatggcaaggaatccacagaaacgttatccgccttgctggacaacgatattgcccatgttgttggagcgttccgtgtacttaatccgaattccgattacgagcaatttgaggcggtctccgctgcccttcaatccaaggataccagcgggctcacaacttcgggtatgtggcaaaaatataacaacagtgtggaattcatggagaatgcaaccccaggagcagttggtgattatttgcaacaaggggctccaaagaatgcgtatggtcttgccaagaaagtactggacagcgagaactatacaaagacggccttatggggtgttacgccagaaatactttcaagctacggcacaaccttggatgatatcctgaccgaaggtttcaccaagatcattatgggtagcgaaagtatcgattatttcgatgttattgtccagaattggcgtgcagccgggggcgatgacgcaactcaggcagttaatgaagcctacgggaagaaataatctcgtttgtcacaaagaggggatgagggtcatccctcccctttatttgatagcgattacatttggcgtacaaggaacggaggaatatgtatgttgagaaaatggaagcagcagagtccttaccatctcatgttgatcccaagcctggtcttggtcttcatcttttgttacatccctttctacggacttattattgcgtttcagaagtacaatccgggtctcggcttcaactcgccatgggtagggtgggataattttacccacatatttaatcagccgaactttgtaagaacgatctggaatacattgtacatgtctgtctttaagattatcggtggtataatcgtgcccgtaattttcgcattattgcttaacgaggtactacacagtggaattaaacgtacatttcaaacccttgtctacattccgaacttcctctcttgggtcattatggctggcatcatgctggatatccttagctccgacggcattatcaatacatttctaagtgtatttgggattgcaccgatctcctttcttggcacaccctcaatttttccttggacgatgattgtcagtgacatatggaaaggtttcgggtttggcacggttgtttatttggcagccctgaccagtattgatccgggactttacgaagccgcggtgatcgacggagcgaaacggtggaaacaaaccatctacattacgttgcctctactcatgccaaccattgttttaatgaccgtactttcacttgggaacgtactcaatgctggctttgaccaaatctataatctctactcccctgttgtctatcagacgggtgatattattgatacctatgtctaccgtctaggaattcaacaagcacagtattcaattggtaccgctgttgggttattcaaatcgatcatttccagtgttctcgttgctgtatcgtacatcctggcttacagagtggctggctatcgtatcttctaagaaggaggaacttacattatgatctatgataaaagtatgagcagacgtgtatttcttatcataaactacaccatattgcttctaatctctctcctatgtatcctgccgtttatcaacctgctggctgtttcattcagcagtagcgcggctgtatctgcggggagtgttacgttctggcctgtggaatttacgacaaaagcctatgaatttgcattaactggaggatcatttttctcctctctctgggtagccattcaacgaaccgttatcggaacggtggtgaatctggttctgatcgtactcacggcttatcccctctccaaatccaaacaaaaattaatggggcgtaatatctatatgggatttttcataataaccatgttattcagcggaggactaattccaacctatctcgtggtcgtcaaaatgggactaatcgattccatctggtctctgatcctgcctggggccctccccgtattcagtatgattatcctcatgaatttcattcgggggctgcccgaggagattgaagaatcagccattatcgatggtgctgggcctgtacaggtattacttcgtattctactcccacttctcaagcccgctctcgctacggttggtttgttcagtatcgttgcccactggaattcgtggttcgatggtattatctatatgaacaatccagccaattatccattacaaagttacctccagaccctcctgcaaagttttgagcaaatcatgctgaaatctgggtcagattatacgcagctgttgtccatgatgaacgccagaacggggcgcgccgctcagatgttcctgggtgccattccgattttgctcgtgtatccattcttgcagaaatatttcaccaaaggtttggtgttaggtagcgtcaaagggtgaataaaagggcttgcagttcatactgcgagccctttgtttatatctaaacttatttttttatgatcgctgtaccgcattatgagatgcataaatgaaagcttgtatgactatttgggttctaggatggcaggcagcagaatggagaaaatggtaccttcacctattttactctccacctgaattccataaggtttaccaaaatgaagttgaatccgccgctgcacattatgcaatccaatcccattcgttcccgtacttgcaccgggcttctcttccaatagattctgcatcgtttgatgatccatacccacaccattatcgcagacctcgatcacaacttcatccagttgtgattgaattcgaatggtgatgattccgtcttcttcaagttcggccagaccatgaaaaatcgcattctccacaatcggctgcaggatcattttgggcatgcgataattcagcagtctatcctcaacctcatatctcatttgaatacaatcgtagtacctgacattctggatcgttacgtaattcgttatattatcaagttcctcacgaatggttacgagggttccatcggattttgttgcatagcggagcatcgagattaaggcatcggtcatttccacgattttatcagcctgctgcatcgaggcaatccatttcaccgacccaagggtgttatacagaaaatgaggcttgatctggtcatggagcgcacgcatctcggccttcgctttctctatttcttcctgctgcatccgttcgaccattcgcttcaattcgtgcgacattctgttaaatcgaatggataaatgtccaatctcgtctcttgatccaataggttcaacttgttcaaactgacctttctcgactagagcaatattccgtagcagttttttaatgggagttgtgatcacgtgagataaaaagatggatatgacggcagcaaaaagaacaatgacgatggcaagcgtcaccagattacggcccaatattttgccatcagcagtcaactcatccaaaggcatatataagtacgttgtccatttttgctgactaaggggactggtcaccacgacattaagtgattcaggcggacgaacgttatctcgaaacagtgtcccgattaatcgttcgttcacgttatatacgatcttatcattctcatcaacgatcatgaatctggagcgcagtccttcctgcaagttgcggttgacgatttcaatgaatttgatatcaatgctgacaacaatcacgccaagcagttttccactagtcacatcatgaattttgcgagcgtgtgacactgccagtattttattctccaattgctcatcaattcgtgttgtgagggtaatggttcgatccttatcatgcatgaactttttaaaccacaattcgtttgctactttgaagtttggatcaatgggttgatgtggactgacaaaaaggtcttgccccccgttcatattgtagaggtagatggagaatacgcgatctttcatcatgatataattcatcagaatattgtatgcggcaatctcatgttgttcatccccctctcgcaggaaatcctggatcggaaaactcccttcatgagtcgcagacagattgtcactaagcccattgctggcgagcaacgaaattttctcaatctccttgaggaactcatcaatgcgaatattcgtctgtttggccagatcgtttagcaacgttgtatagttctgtgccaacaaccgctctgaggagtaatacgaattgattgtcatcaccaataccggaaggataatgaccgtcatacagatcaccataattttgtacttgattcggaagggccgaacatgcttcatatgctgcacctctattcaccgattacattcatccctgctgtaattctcgatattcctcaggagtgacacctaccgattttttgaaaatcttactgaagtacgtgtaattatggtagcccaccttttctgcgatttcatacactctcattcctctgctcaatagatacgccttggcatgttcaattcgaactcgggtcaagtacgtaataaagttctctcctcgttcctgtttgaacacacggctgagatacgacggattcacactgatttggctagcgatactttgcagtgagatatcttccgcataatacttgtcgatcaattcagtggcgagatcggtgtacgtgctttcctgtttgatttgggaatcggtttggaagtaatacgcaatatgagcaagcatatcttggtggatatcctcccaatactccccctttagaacgatttcatagggtgatttttctgttaaagaaggtgcacctctttccgtagctcgggatagatgggaatgtatcgtttccattaccataatatattgcttgcgaatgctattctcatctgctcgtagctgttccagattggatcggattccttcaaggaactcttccgcctttttgttgtctttgcttacccataacttcaacaaatctctttcttgttgcgggcttaaagcccccttaacttcatgtcgatctggggattgaaccatatcatcgtaatacaacacctggttgcttcctgtgaagaaactctgttgtagagccgtttctgcctcttggcaggccttcctgatgtgaaggaaaccggaagtcattctacttaccccagccgtgagcgatagattcataaaatccttgatcgaagacagcaatttattacatagtttatttaagtcggcgtgtacagattggctctcaggaagtacattgacgatcacccaatattctgaggaactttcaacaaaaatctctttctcccacttcgatggaatgatctcttccataatattaagaatcgaaaatcggagcagcttttcccccttctctacatatttccgctttgcatcctcgtaatagttcacgatgaatttcatgacaaccaactggtccgaacgtatacgaaaatgcagttcttccgctttggtgacgatatcctcctcactaatgaatccgcttacaatatcttggaagaaactatcctttagatatcttaggctcttggaatagtcctgtgttatagagggtgtgttggttgtgtgaacatgttcactttgaagtttctgtccaaccgtgctcaggaggtcaataagggaggattcggtgatctcacttttaatcaagtaatctgaagcgccaagttttagcgcctctttcacataatgaaattcgtcaaaattactcaggatgacatacttacaggttttcagtacgcaggaggcctcttgtataagctgcagtccatccataatcggcatcttgatatctgtaataattagatcaggcatcacttcaagcgcaaggcttaatgcctcttttccatttcccgcctcaccaacaacatagaaattgtactcttcccaattcagcatggaacgaattccaacccgcatgagcaattcatcatctacgatcatcagtttatacatgcgtatcccccaacatgaaccatttttagatattttaccattaaacgaactgttgcaaagatgactagcgaaccttattgaattgcgggtatcataaataacacttttacagaacatacgttcctgttataattagattatcgtaattggtgtagaataacatgcccgtatggaaaggatacatatcatgaatttatacaagtttgaattaacggtgaacggatatctattacgtgttcatttcagtgcatctgaagaaagtggattgaaatggtgcaaacgagttgcttctgaattccagaataacgttgccaatctggagatcaaggttgatatacataaaaagcagaaacaaaagcatgcacgggattatcacggaaaaccgtatctgtatgataggacactcaggaaaaagccgcttgcgaagaaaaataaaacggctgaatcatctgcggttatgtaaaggttactaaaagatgctaagattctcatcatataggctaattgtggttggagagaatttaattcgggtgttctccactatgccgaacagtttagcgcctctgtatactcttgtccttcctgtccttcctttaatactaaagataaaagcctgctcctatgtggaacaagcttttatccgtgtcagttgtactatatgccaagaaagatttatgttcaccgtttagtatctctctgattccttaaatatcatataacgatggacacctctgacagcttgcattgcttcctgtaaatgctgaatcgcagtttcgcgttgtcccgcttttagttcgatcgctgcaagaagcgaagatctcatccagaccttactaatggattttaagtgttccctcgcctgctcacttcttccttcttccataagcaaatacgtttcataatatgtacgataatccgatctacgcatattctgcaccgcagtacgaacagctaccaagtcgttgcgataggagccgtaagctgcattatagactgcttgggtccttttatttgtgtcctcatttctgatgcgctctattgtgtgttccaattcatcatcaagtctgtttgcaagagcgtaatagatataaagctttggggtattctcctgtctgcgtagaaaagcctcgacgcggtccatgcgtgtttcccaacccagaggataaaaaatacgaatggtaaacatgatcagagtagcggtgagaacaactccaagtatccaaaacagagattggtcattcatcttcatatacacaacaaataaaaatacggccaaataaaaaacaatgtcccacttatattttcccatcttccatctcctttatagacataaaaaactattatatcaaaacaaaccccgaggagtacatgcaccgcatcctttggggtttagttaaatttataaaaattgatttattgaagttttcttcattaacgacaatcgaccgtattgtcaactcaatagactagattcttacgccccgacgtctccaatcatttgtcgttcaatttgtttcatttcataaaaatagcctttttgctccatcagctcggagaaagaacccgattctacaatcttgccttggtccatgaccacaatccgatccatctcttccaatcccgtcagccgatggcagatcaggagaagtgtatcttcggatgcctgtgccagaagatgctgcaatacacgttgctctgtgacgtaatccagtgaagaagttggttcgtccagaagccataaccgtcctttgcgcagcatggcccgtgcgagagccagccgttgcttctcaccatccgacaggttctcccctttttcatataccatgtcggtcaacaacttattcggcagttggactttatccagcacagccaacagttgttcatccgaatgttcttctccattcagcaacaggttgtcccggatggttccccggaaaaaatgactttgctgcaacacaacgtttgccctttgccatatgctctcttcattcagttccttcaccgaaacatcgtttaatcgtatatcgccagacgttggtgcgcgcagcttgagtaacaaatcgataatcgttgacttgcctgacccgctcggcccgacaatcgctgttttggagcctgctgcaagttgcagagatagctccctcagcgccggtctccattccccttcatattggaaattaacaccggatagttcaatcgaaaccgcctgatcggctgaaacttcaccgcttgactgtacaggttgtacatcggaggttggcaccgtttccgccagtcgctgagcggcgtgttcgctgtcctgcttatatagaggcaatatagccattgcggcagcttcttcgaacacggtctgcgtggccaggatcaacatggcgaggaatacacctgcaaacgctccattcacaattaaaaaggcgctcagtgccagcactccccatgtaacaagatacgtcacaaaaacgtgcatggattgcccgcgcagcaagtgcgaagcggcttgcttctgttccgttgccaatgcagcagaagcctgctgaagctgttgctcacgctgttccaattggccgtatactttcaaatccctgaaaccatacaacacttcggttacttccgtggacagcaaggcccgttgctggcggacacgtccgtgtatttttcgctgacctaacaagacaatacctggtacaacaaatgccgtaatcagcatacctagtactaacaaacacgcaatccagatcgaaaaggccgaagtgaacagcatggtagccaaaaacaccataacgaccatgatgggtggatacgcgacccgcaaaaagtaattttgcaaactttccacatcacccacgatccgcgcaagcagatccccgcttcggtttttgttcaatatacctggcgttaccgggatcagtttggcaaaaaaggacgtccgcaaacggctcagcatggagaatgtcgccctgtgcgaatataagcgttccccgtagcgacttgccgctcgaaggaaaccaagtagtttgaccatggaggtgagtacaattaaggtgtacagcggtggggcaaatactgtttgagatatcatataaccactcgcggaaaagagagctacccctgctatgccggcgataaatccgcccaatatcgaaagcaagatatccttgcgctcctgaatcatcgcttttgacagaatcgtcaactcattcatgctaaccctcctttccgttgtacatcaatcatctccgcatattgaggcaggcgcgccagaagtgcttcatgatgtcctgaatccactaataccccactatccataaacaaaatgttgtccgcatgttgaattgtatataaacggtgtgccaccgtaatcatcgttgccgttttggctaatgccgcaatggattgttgcaatacccgctcggtgtgtagatccagaccaacggtgggttcgtcgaacaaaataacagctggtcgcttcagaaaagcacgtgccaaagcaagtctttgcttttccccaccagacagcccccggccaccttcaccaacaaacgtatccaagccctgctccaattgtgcaacaacgctagcaagccctgcttcctctgccgcctgctcaatttcagctctggagacgttccgacccgcgccaatcgcgatattttcggcaaatgtacctgcaaaaatatacggatgctgtgtaatatagctaacacgttcaaaccatgcagcctcatcatgttgcgaaagctggcttccgttaaccagaaccgctcccgaatctggtttcagtaaaccggcaatgagatgaagcagcgtggttttacctgagccacttttgcctacaatagcaatctgttctcccggtccaatcgagatctgtcctgtctcaagtccaaaggaatcaggtgtgtactggaatcggacatcgttcagttcaatggttggtggcattggaatcaactcggcacgagctgtacgaagctcttccgtccttgcaattgcatcgacatcggttaattcgctttgatccggtccttcttcaggcttcgtttgtgtgctcttgacactagtgtccgcgagcatctgttccaccttgcgaatggcccccatactggttcgcccgctgtgaaaagccgttcctgtattcttcaacagactgtaaaactcagggacgagtaacaacacgagaaaggctgtgtggaagctcatcgatttgaaaaccagtaattgaatagccagttcaagcgcgacaataccaatgcttaacatcacgatcgattccagcataaacgtatttgtaaatgcaatcttcaaaatgcccatggtggcatcacgataccccagactgctgcgttcaatctcctgctgttgacgtttagcccgtccgaatattttcaacgtaaccagcccttgaagcgaatccagaaacgtaccggaaaactcagccagttgcgcgtatttttcttctgatttgttctttgtcttgagcccaaccaagatcatgaacagcgggataaacggtgccgtaaacagcataatccagcctgtgttagagtgctgcgtaaacgtaacaaccagaatcagaatcgggatcatcgcagcttccatcatacgcggcatgtactgactgaaataactgtcggcctcatccacagcatccaaagcaacactgacctttcctcccgtctgtccactcagggttgaaggcatggaagcgcgggtcaggttctgcaacacagatgctcgcatattcgtcttggcgcgtgctgccatatgcaagcccactttcccattaccatacaacaacagtgagcgtacggccataacagccaataataggacaagcaacaggatcactgatgaaaaggaagctttctctacaaagattcgctggactgcttcagccaccaaggtggcctggcttataatagctacaccaagggccagcgaaatgatcgcaaggagaagtctgttttttcgttgtaaagacatttgctgcgagatcagattggatttgcctctccttttcattgaacgctcctcctttattttttccctttcacataatccgcatcaaacaggaacagtttgaagaccagaataagagaaggaattaacaggcacagaccaccgataaacacaacgacgagtgcaaaacccatcgctggtggtgtcgcgctactctgaatggtgatgaatggatcgagaatgtaaggatattgcccaatcccgtaagcaaaaaaggctgtgagaaattgcagcatgatacatataaaagctaaaccgtaacgccatccgttatataacagccacatggcaatcatgaaaaacgcaacagaaagcgccagcagccaccataaatccatcatattttgaaaatgacgctcattgtgttgacccaaatatataaatgcagtcagcgcgagaataatggtcggtgtgctccagaacaaagcatagttccgcatcagcttcaatgccgaatggtcctctgcgcgagaagcgtaaaatgtgagaaatgacccactaatgaacaatacggacacgatcgccagtccaacgatgctccacgataatggattcgtaaatagcgcccagtaatccagggaaacggtatctccctgcttcaaaataaagccaccttcagaaagggtcagtgccactgacaatgacgccggaataagtagacccgtagctccatataagaacaaatacacgatactttttttggaaccataattttcgaaagcatagaacgacccacgaatggcaagtagaatgacggcaatacttcctggaacaagcagcgcggagccataataataggccgtgtccgggaaaaatccaacgatgccaatatagaaaaagacaaaaaatacattggtgatctcccagacaggtgatagataacgggagatcagacgattaatcagatgatcctgctttgtcaggcgtgcataaaaggcaaagaaacctgctccaaaatcaatggaagctacaataagatagccgtacaagaacagccagagtaccgaaataccaattaattcataactcatcaggcctgatcccctttcttggctgattgatcatgcttctccttcaaccatttctccatctcgagttcagcaggattgttattgaacaaccgtctcagtacgacgacacacataacgcctagcaggatgtagagaagcaagaagacgaaaaataaaattctcacactcggtgaagaagtagcggcctcttctacccgcatataacctcggatgatccatggctgccgcccgatctctgcatagaaccaacccatctcaacggctagaaaagcaagcggtgcactgagtgcaaccatacgaagcatccacttgttaaactggttacgtttcttccagaatacaaacaggaagtacagacttgatatagcaagcagagcgaatccaataccagccattagatcaaacaaataatgcacaagtaagggcgggtgttcatctggtggaaattcgttcagcccggttacctcggcgttaaagtctccaaaggcaaggaaactgagcagtttcggcaaatgaagagcgcctataatttcatgttctgcattcagccatcccaaaaaaatcaaatccgcgccgctttccgtctcgaaatgccactcggcagctgcgagcttctccggctgatgctcagccaaaaacttggcagacacatctccagctaaagaatttaacaaactgaataccagcacaacggccatcatgagattcaagccttttttgtggtaggctgacactccttttctcagcatcgcaaaggctgctattcctgctaacagagcagctcctgtcagataagccgagcttaatacatggaacactttggagaacgtcgctgtattcagcatcgcttgcacggggttcactgccatgaattgacctgcttccatgacaaaaccttcaggctggttcatgaagccgttcactgttgtaataaaaacagcagacatgcctgccccggcgacaatcggaatagtcagcaaccagtggatatacggatttttgaaccgatcccacgtgtacagataaatgcccaggaatattgcttcaaaaaagaatgcaaatacttccataaatagtggcagtgcaatgacattcccggcaagtttcataaaattcggccataccaaggccaactgtagtgagatcgctgtgcctgtcacgacaccaaccgcgacagaaatgacaaaccctctggaccacctctttgccataagtatgtaatggtgatccttcttccgaatgccgatgaactctgcaatagcaatcatcaaaggtacgccgacaccaagcgttgcaaaaatcacgtggaacccgagcgtcaaaccagtcactagcctgctccataaaaccgtatcaatagccattctttgtgttgcctcctttcaaactctgttcaatttagaaacattcaatatcagatttggccaagctcaatgcagagttgcgaaaaatttcacaaagttaggtatgacgatatcttgccacacctataatgcgtttactcctgtaggcccccgataataacaatcattggatgcctattaaaatctgatattgatgcacttaaagtactaacgaaacctattaatcaaaattattatatctttatttttacctaattcaatcaaagacacggcttctaccctaaacgttcaagaaaggatcaactctttctgacaacttggtgaaaatcaaaaaatacacccaatggagctattgattcattgggtgtaaacgtgttattgcacggaagattctctattttacttgcttactttctccagactcaccgcacctgcctcgcgacgtacgctcatgatgatcagtgatgcagctaataccgtaaggatgattccaagcatctgaaatcctgtcacattgaatgtatcccccataacaattccaatcaataacgacgataaaatggtccccaggtagcgtgatgtattaaaaatacccgatgccactccgatcatttctttcggtgtgcttttaaacagtgctgcttgcatgccgaccgcgtttaggccattacttattccaaataaagctaaggcaacaatgattatgaagattggagaagtttcattcataacaacgatcaatatagatccaaatgtcattaaagaagcggatacgatcagagctggccgtgatcctgatctgtcaatccagcgtcctgcgatcggagcaataatgactgaacataaccccaaagctagcatgctcattcctgtatgaacttcgttgagatgacgtacctgcttcaaatacgtaggaactccaaaaaaaagtgcgtaaaacaggatgttcaccagcatgtattgcacattcacccaagtcatctccggatatgaggcaaacgttcgcagagggataaaaggcgtggctgcttttaattcatgtcggaagaacatgacgagtgcgattaacccgatcccccctgtcagcagatgccatgttgaaatatctcctgtggaatttactgaaagtaaaccgatgagcagagtcaccaaagctaccgtaaacatcaggatacctggtgcatcaattaacgcaagccattgccgaatggacatgtgaccagagatagacgaagattgctcgtccttcgggattgttttccaggcgaaccaaaagcttgccaagacaaacggaatattaacgaagaatatgctgtgccagtcccaccaatgaatcaatactccaccaataaaaggtccaattgcagccgctccagaaaggaatatagccaaggtggacaaggcggaggcttgtttttcagtcacgttcattctgacaatcgccattccgacggccaccatcatgcttgtgccaattgattgaacaatccggaatacgatgagccacgaaaaactgggagaccacggagctaacatggacgatacaaaaacaataacaagacccatgaggaagatcttcctgcggccaaacaaatcactacacttgcccatgacgggttgagcgacagcactggcaatgtaaaataataaaataatccacgaaacggctgtaaaattaagttgatacacttgttgtaacctggagattgccaccgaaatcatggaggaattcaacggattcaacataattccgagtccaacagctaacatcaatcctttatttcgaacgttcattggtgcacctctctctcttctgctgttatcttacttgaacgtattcatttattccaacgcattatatgttatgatttgatgaactagaaggaatgaagggatggtgcaaatggagcttcttcaactaaaatatttcctgacggtggcccgatgcgaacatgttacggaagctgcgggaaagctgcatgtcacgcaatcctccctgagcaaaacgatacaacgattagaggacgacttgggagtccctttatttgatcgaatcgggagaaagctgcgactaaacgactttggaagaacatttcttcagcgaactgaaaaagccttatttgaattggaacaaggaaagcgggaaatcgctgacctctccaacccggatcagggtacactgcaattggcggtgactacggcgagcacattgccaggtatactccgggaattccggaaaaacaagccggatattcagttccatgtgcaaatggtttcgttagaaaacatgtccagactcctacatcggggcgaggtagacttttgtctctcctcccctccgattgaaggtgacgatatcgaatgtcagatactatatgacgacccgattgtagtcgctgttcctatgggtcatcgatatgcagaccgaagcagcattcaattaaccgagcttaaggacgagcggtttgttggggtgaagcaagggtatggggttcgtgatatggtagattccgtatgtcaatccgctggtttcctaccgaagtatgtatatgaaggtgatgagcctgcaagattaacagcccttgtggaggcggagatcggtctcgcgtttatacctagcacagccagaaacccgcatgagcgcattaaatatcttcaggtagaggaacaccagctcgttcgggaaatcgctctactttcgcacaaaaacaggtatatttccaaagccgctttagagtttcgcagcgtagttatggactatttcaatgctatgccacgagcataaattcaatccagaggagtccattcgaacatctgaaatttcaccgcataaaagctcatatcaatgtggataacaccccttccatgaaactggcagagagtgttggtatggaatttgaatgtctacgtaaagggtttatacacgaaaataatgaatggaccgatcacttggtgtattacaaaaattctatttaaacggttcatacaacttactctaaaacaagggaactccatatcaagaagttccctgttttctatgtttgttgaatattcttctttttgcgatgaagggttactattcccaaactaactgttgaaatccataataggattattgcattacttgagactaatgattgcactgtatctagtcgtaatagttgcgtaagtaaccttccttcatacggtgaaagtgtggctcccaagttatacgcaatcagaacaatggtggtacccaactttgccattttcgcgatttgttgagcaaaagtatgcaataaatagggcattatacagcggaatgaaaacccgatgatcattgagcaaacggtagtaagcatgatactttgagagatcgtcgtaacgaacatcgagcttccaagtaacagaatcgataatggaacgatatagttaccgagtgttttgtatactttcccaaaagaaaagccggcaacaaaagctcccaaacctataaatgcaatcatgttgcttccgtttgtcgcagctccgatatttttttccaaaatcaaaggagtaacctgtaaattataattgatgaagatagctacaatcacaaataataagagaccatagccgatcatgacttgaagggcttttttattatttgtgtagcttgaattcgtggtgacctcttctcttctattaagctcttttgtatcagaaggaacgaaaatcaggaacgcgatgaaaataggaagtgccagggcatagacataaaatgatgtgtgccagcccattttcaatagttgaccaacgagtagtgtcagacaaatgcctcctaatccctcaaaggcactttctaagccaattacggttgcttgtttacctggatttttatgatacatatcactgatcatctgaatgatgagccggttaaataaacctactcctaacccaaacaaacagcgagaaatgaacagcaacgaaaaaaggtcatgatacaatgcagggaatactcccgcaatgagaacaagtcctaatccagttagtatagttgctttattcccaataagaagttcaagtcgattagcaattaacacaccaagaatgacaaataatgaaggtatggtcgttaataatcccacgtgtgttaccgatatctctggaaaatcattggttatcgcaggaatgttagcagcaatcactggacctgaagaaattaataacgcaacggacaataatgaatatgttttaagcttctccatggatattataaaaaaccaactcctaatgtttgtatttgctccatatagccgatagttagccttaatgctgcgataaatggataaagcagtaacgcataagtcgatgacttcatacgttactgctcagtcgattagagttctttgccgttactttgaataacttttttgaaccattcaaaggattttttcttgctgcgtttcaacgtaccatttccagcgtcatctttgtcgacatgtataaaaccgtatcgtttactcatctctccagaacttgagcttactaaatcaatacagccccaggacgtataacccaacaactctacgccatcttcttcgactgctgttatgaaagcttggatgtgttgacgcagatactcgattctatagtcatccgcaatgtatcccgtctcatcaggagtatctatcgctcctaggccattttcaacgatgaatagtggcttttgatatcggtcatacaaggagttcattgtaattcttagaccttcaggatcgatttgccatccccattcactcgttttcaaatgaggattgcgcagtgttggaaacaggttagctgccgtttgtgtgtttacttccgggtctgcactggttaatcgtgaaccataataactgaacgaaacgaaatcaaccgtattatttttcaaacattcctcgtccccgtcttccatggctaaatgaatattcattcgttctaacattttcttggcatagtttgggtattctcctcgggattgtacatcgacgaagaagtagtgctcgcgatctcttgtcatggctttccagacatcatctggtgcacatgtatacgggtaagtgttggcacctgctaacatacagccaatcttaatttccgggttaattctacgcgcaatttcagttgcttttgcacttgcgatcaattgatgatgagccgcctgatacttcacagcatcctcattctcactttcttcaaacactaggccagagctgccaaaaggtagatgcaacagcatgttaatttcattaaaggtaagccaatacttcactttatctttataacgggtgaagatcgtttcacacagtctctcataataatccaccatttttcgacttctccacgatccaatagttttcaccaaatgaatagggacatcaaaatgggtaatggtgactaacggctcaatgccatacttcaagcattcatcaaatacattttcatagaatttcaagccatcttcgttgggtaactcgtcatctccattagggtagatccgagtccatgccaaagataaacggaaacacgtaaagcccatttctgccaataaagcaatgtcttctttataccgatgataaaaatcaatagcctcatgactcggataaaaatgttcttgatcacactccaacatttttaactgtcctcgcatgacaggaacacgatctttccctgccgggattacatcaactgtggatagtcccttgttgccttctgcatatccaccttcacattggttagcagcaactgccccaccccacaaaaagtcttttcttaaagtcattaaaacacactcctaacctgtagttttgttaagctttgacaaccaacaatgtattgttaaaatcaatatttttgggactagtctctgcgatcacatccgagtaactatacgaattggttacaatgacgggcgtttgagtgacatatccttcttgtctgattttgtccagaccaaaagtcagcaaggtctgtccttttgtaattctctgaccttcttccacgaaagcctcaaaatatttcccgttcagctttaccgtatttaagccgacatgaataagaatttcgactccttcatcggataatagtccaatagcatgttttttaggaaatagagatacaatcatgccatcaaatggagcaataactttcccctcgctgggttcaatagcaattcctttacccattgcctctgaggcaaacgctgcatcttgtacatcctgaagttgaataagctgacctttaagtggagttgcaataacagaatctttaattgtaatgacttcatccgcaaccccactcccttcgttcgcatttaaaacagtgttgttctgtgaaggtgcgtctttttcatatttcaaactgagcaaataggtaagcacagcagttacgacagttgttataacaagtgcgatcaaaatgttatatagattccagatattttcaccaatgtacagaggaatcgccgggattcctgaagcgcctgttgcgtaacgggaaacatccattagccctgcaaagagtcccccactggcagctccaatcatacccgcgacaagtgggtatctcttcggtaagtttacgccataaagagctggttccgtgattcccatcaacgcggtgatcccactggaagcagaaatttgttttaatgctttatccttggttctcatccctacaactaatgccgcaacaccttgacctatacaattgatcatcgctccaggaccgaggatattctcataacctgatgtggtgatttgagcaatggatagaggcacaatattatggtgcagcccaaacataaccagtattggccagaaggttgcaaccaggaaaataaccagccagctaccatgtgcggccaagaagtcaaagcccatcgctaaatacgttccgaaaaatgatcccagtggtcccaacacggttaaggccagaattcccgttactaaaatagtgcacatgggaacaaaaataactttcactgcattcggaatgatccttttaaacaacgattcaatatatgattgagaccaaactattaagagaattggaactacagaagaactatacgatacaagagttagcggaattccaaaaacacttacgtcagacccatccaaacgcaattgtgtcaagttgggatggagtaaaacaccggctaaaacgagtgctaagacgggactgcattttagtttgtttgcagctgagaacgctaacaagaatggtaaaaagtagaaaatagcatctgacataagacttacgacatagtaggtttgtgaatcttttgaaatccagttgaacaaaataagtagagcgagtaatgccttgatcataccagccccagctatagcaggaacaatcggactaaatgtccccgagacgaaatcgattaatttccccaaaatactaactttcctagcttgagttggttcacccgatgaactcgcgttaagttgaagatgcttgatcacttctttgtaaacgtcttcaacatgtgtgccgatgacgacttgaaattgtccgccgctctcaaccgcatcaataacaccgtcaaacgatttaagcgctttttgatctgctttagtagtatcattcagtgcaaatctaagcctagtcatacagtgagtcagagtggatacattctcactaccgcccactttctctacaatatcttgagccaacttctcgtatttcttgctcatccaataatgccccctcttgttgttgccatcgaaatgaatgagaccaaaagcgctctaaataacttctctttgcaataaaaaaagctatttatctgaaatacataaaggctgcattcattacacctttaaaatatcatctgataaacagctatagccaatacctataattcatactttattatgcctgaaaggcatgcctgatatgttccaaaaaacgtacctccgtttgactgaataccttatgttttttccagacaatcactgttggaaactgaagttccggttgaaaaggtctaaagcataatgtgtcagactgcttcattgcaagcgcaccctcaatacagatggccgtccctaacccctcctctacgaggttaagtatgttagatattaaattataggtcgcaacaaagtttaaatgtgcatactcatcggcaaaccagcttgcaatctcattctgtacgacagatcggctggatatgagcagaggcactccggctaaatcggttgaagtgacatattttttttgtgcaagaggtgatgaggtcttcataaggactccccagcgctccttctggggcagtctgatgaaatcgtatttctcaatgtgaatgggctctaacaaaatgcccacatcgagcagtcctttatcgattcgctcctttatgtcatcccccgttccactatagatgtgatatttaacctgcggatactccatattgaagtcttttaataattgtaaaataacattggacgttaatgattcaacactcccgatcgatatggttcctccgaccagattgttctgatctttaaactctttctctgttttatccgcaagagtgagaatttcttctgctctttgacgtaaaagcatgcctgcttctgtcagtgttattttacttttaccgcgtataaacaattgagtttctaaatttttttccagatcagccaactgcctgcttaacgttggctgtgtcacatgtaagatcgttgcagcatgtgtgatattttctactcgagctactgtcaaaaaatatcgaagtactcttaactccataattcctcctgatttacgttcatttaagtgtctactgaatcattcatttctttactataccttcctgttaaccagaagaagacagttgattgggataatcaactgtctgttgtttcaaataaagaagattatttctctggaatgatttcattaacgcaggctaaagcatttagtgttcgaggaaatcccatgtagggaaggcagtgagttagagcggtgatcatggtttctttattattgccaacattgatgttaccctgaacgtgtgctttgacttgactatccgcacctccgagtgcacttagtatacaaagagtaagtagctctcgtgttttcagatccagacctccgcgggtatagaagtctccaaaacaaaatgctgaaagatagtcctgtatatgcttctgatttgacggggcattttcccggtttttctcaataatatcgccaaaaatctctttttgaataccaagtcctttgtcaaagcgattatcatcttcaacccgtttttgactttcaagaggcagtgcaacatttcgctctttgaacacttcattcatttccgatatggcatttaaggttttggggaatcccaaatatggtgcgcattgatagattgcttcttggatctccgttggtgtcaacccaacatttagcgctgcacgagtatgtgctttgagctgtggcaacgtttgattagtagccagtacgaccaaagtaataagctcacgttgctcatcatcaagggtaccttgatcaaaaatttcaccaaatatgaagcgacttaatatgtcctgaaattcaggatctgtagcatatgccgctggaactccctcgccgaatagccttttatatgtttcctggctcttttcgattcgattcatattcatctaacctcctgtttctttttagttaaaactaggtttacccattttacattgaaaggggaaagaatccatatcctattcatatcattttattgcctaatcctatcaaatgattgtttgttgatgaaaaaagcgaacaaagcacttgcgtgccctgttcgctcttcttggttaagccatattactgtcttcaccttactcgcccaagctgttccagaatgattggaacgcgcctttctccacttccaggaatgccggaacattaccataacgaaccagaccttcttcaccaaacagaaccagggggacctgcgttttgtcttccagcgtgagatagatgatcttgcgatcttccttgccgtagaggttctcttccaactccgggctcgttgcgatcggtttggcagcatttagcgatgagataaagctgtccagtgcttcatccgctgctaacggctgaagctgctgcaatccgttgttccagctattaaacgtctcccattgcgccgaggcgatgttgccttcgagatgaagcttgccgatcaggtcggcaccagtaccaatggtgatcccgttgttcttgtcgaataactgagcatacacctgaccatcgatctcggtgtaagacatgatgcggaaatccttgtcgtagccattgaccgcatagatgtctgcttcgccaatgttggaagcaagctccgtatatttatcctggccgctcagctcatcaatgccgccagtggtggtacccagtttatccccccgcaggctgagtgcatttgcaccttcaagcaatgttggggactgtgtatatacgcttcctccatatacaaccagttgcatcatatcagccatcgcgcctttgccctgtgaactcggcaactccatcttcggaatcacgatcggatcaaacgatgctcctggagtcaccgctgccacctgtggtgttggtgcggctggtccattgaattgttgccatacacttggcgcagccaatccaatgctggcagcgataacaacacttgctgcaatgtatagtggtttacgttgacgttttggtccctgatgttgcgtgtttaaggattgctctacccgttttttcatttgctcgtttgttttcatatgatccaccgctttcttgtagttttgtttgaattgttcttcgttcattacagttcctctccttccagctccagttttaacagctgtcttcctcgtttcaatctcattttcactgctgattcgctaatctccaggatctcgctgatttctcggatcggataatcttcgtaataatacagatgaaccaccgatctatacttgacgggcagtgacagcacaagttcgatcagcgcgtgatcttcagggttgtctgttgtaagaggatcgactccctccagcttgacctcccgtttgcgccagcctctgcctaataaggatttgcaatgattggtgatgacccgaatcaaccatgctttttgatgctccgcatcgttgaacgtaggggctttttctattagtttgatgaaggtatcctgagtggcttcctccgcgtcttctcgtctgccgaggtgcaccatggcaatccggaacagcgtatccgcgtatgtctcatagactttcatcacatgatcgcccagctggggcactgatcgctgcatggttgttatgccctcctttatacctctaacactcttacggacggcatttggtcacattttgttttaggatttttttactggtccatttcattcaaaatgcaaaaaaaaaaagctgctccatgaaaaggagttgctttcttcatcttcgtctttattttcatataaaatgcatatctttcaccaactagaatttcttctgtaaaagctcgatattgtcttccaaactgctgtccaagcttacgcctaccttctgcagtttgttttggtaatatgtcttcacatcttcccacttatagtacggataggtctttgtttcgatcgggaaggcgatctcttcttcatttctaagcattttcacgagaacatccttaccattggaatacagaatccattggatatttgctcccatcggtgagataacggagccattccagttttgggtcacgtcctgcggtttgtcgatactcacattagctccggcgatatccaggaatgaagatagtggaatgatggtttctgcgtgagcaaaacgaaatataccagccgtgtctttttgctgaatggactggtcggtagacacgatcaattctttgaccagaggtgcaatgatattttgcggcaaatccgttgacgttaaagatggacctttttcataaaaatcattgatattgtcaatgctctcgtaccattttaactgattagccgtgaaataccgcccgaattcgaagtcaccttctcctttaatattcgaagatatgatgtagagttcgtataaattagaagcagcctcggttgggttgctgagcttcacttttcccttctcatctttcagttcaaactctccagcgttcagccgttgatagaagtcatcagagaaaaattgcagaaggacctcttttgcataacgcgttccagtgctctgtgtgacataatcctcatttaacttaacccagtctccatcttctacgtactcattatactttgtcgctaggtcgtagggccgtagataggggtcttttccttcttcaaaagctgaagccagaatgtctaccttgttatctcccaagctttcctttaacccgtcaataaactgatctctgctctgcggcgttcgatctttgaaggttgcttgtgcaatcacttttttatctgatgtaaatagttctttgaaattctgcccaactctggcccctattcctttcaattcttctccacccgtagtggataacaatccataatgatctttttcaaccttcatcagattgccaatttccttcttcagctctttgcccagattagtgatctgcccgtccttttcagcgatgtcgagcagttcaaataacgtcttgtcgtacttggaactggatagatgtctggaaccatgtctccctatgtagttaataaatatgggttcatatccactaggagcttttgtataacttgtttccttaaaaggatatggcgttttggtaccgcggtatccctgctgctgatcatccactttttgtccaacaaacaccgattgggtgttgttatcccagtctacctcttgccccaaggcttcaccaatcactcttgcaggtacataagtgaccccattgtagagaaatgattcgccttccaccctttgtccgttcacaaccacattagccgattgttcagaaacttcgatcatgcgtttggagcctgcaccatatgcgtcaaacacacttacagacgttaagatggcgagtgatgctactgaaatcccgatttttttgatcatcataatgaatagttttctccttattccgcctgatattggtttattttcgctcatcatactataggtgtgaagtgtctgcgccgtatccatcctatgttaattaattgtaaaagagtacatataaatattgacgtaaagtctcatacaacaaaaagagccgctccttagcgactctgacttttcattataaaaagctatcttctctgccatacaataaaaagataattgctatttgccccgcattacagcggttttctatatatttttatatctatccctgactccgtcggatgaccttctccaataagtgtctcacggttcaagaaggataaggctttgctgtctgtaatcattttgggggaagtacgaaataaagcagttttcagcgttttatcaatatttccgttattttcgatataaattttgcaggaatgacctgtgttgtcggtcccttggagcatgtatcttgccgatagcgtatgcgggtcaccattcttccctatgatctgcgtatccactcctccacccagcacaattccctcaaagtactttccggttacgctgcctgtaaaagtaatcatgacaaccgaatcatcttcgctattctgtaaatcaaataattcttcgatgttcacatgtactgtgaacaattcttctaatttcaagtgttcccacctccatatgggttcaattataactctactcactagactgcttcactaaaaaaaagatttacatatttccttcaaatcatttaaaatggtttacacaatgtaaaggttaacaagttgtaaacgaaggggttaatgacgtacatgagtacattaccaaaatcagttcgctttccactgttcattctgatgttaaatctgtttattgctttattggggcaagggatgctcatccccatattgccggagtatttgaagctttttcatgcgggaggcacagtagcaggatttttagttgccgccttcggtgccgctcaattcttcttttcccctctcgggggacaactgtctgatcgatttggacgcaaaaagttgatcattgcgggtatgtttctgtctgtcatttcagatatcatatttgcgctgtcgacgtcattgccgttcctctatgtcgcacggtttatcggtggaatcagtcttggtttaatggttcctgccaacctcgcatatgtcgccgatattacaacgccagagacacgtgcaaaaggtatgggctatttcggcgcagctatgaatttggggatggttctcggacctggtctgggcggtctcatcgccgagatgggcattcgcatgccctatttctttgcagcgggtctgggactgattgcggccctgatgacgctgctattgcctgagacacttccccccgagaaaagaacggtctccatccgtcttcaaaaaggagatcacttgggcaagaaaatctggagttcttttaaagtcccctatttcaaatacttgattgtgttgcttgtcatgacctttggtctcatgagttatgagacagtattcgcgcttttcgcagagcaaaaatacggattcgacgctgcaacaatctccatcattattactttgggcgcgattatcggtatcgttgtgcagatctggcttttggattggttcgtacagagaataggtgaagttaagttgatccgtctctccttaataatcacacccatagctttattgttaatgttaattaaggtcaaccttgtgtttctgttgttcgcttctgcgttattctttgcctttaattcgtttttgcgaccttcggtcagcacgttaatatccaaaaatgcaggagatcggcaaggttatgcatcgggtctgaatactacattttccagtctcggcacggtgattgggccgctgatcgcaggactattgtttgacaaaaacataaacttcccgtatatttttggtgcaattatgctactcgcttcactcggactgaccttgaacgcatttcgttcgaagaaaggacaattgtatacaagtgaatgaaaactggcatcaacaattgggaaataaacatcgtgatgatttgattgcagcaggtaaggagctttttttgaaatatggattgctccaggtgaagattaaggatgtatgtacgaaagctgaacttagtagagtgaccttttataaacatttccagtcaatggatgaacttcttctagccattcagatgcaactgatcgaacatttaacggatgaggttagccgtgcttcaacgaaggacttaaacgggcgggaacaactcacggttatgttgaatgcatgggttgtttatgccgagaatcatccagactacatccggtttattcaattgtttgatatcaactatgagatgtatgattttagccctgaattaagagaagagtatgataagttcaaccagaacgggaaagaaaatcatttcctgatggacgctttatcccaaggtgttgttgacggcagtattaagaacccatctcctccgctggatctggctcagtttatcttcacaacgatgatgggcatgctccagcgcatggtaactattcgtggtgcttatgataattcattggatatgcggatgacggagcaatttgtgaagatgctgctccattttgtttgtagcgaagaaatacccgagtgatagcatggtagatggatcgataaaacaaaagtttaaaataaaaaacggattccgtattttggaatccgtttttttcttcattaattaagcgttaatccgttagcacgggcaactttcctccagctttcagttgaccaagcaatactttgatcccggcagacgtattgggctcctgctttccatacacagcaagccctgagcgcacgttctgcaaatagatcatctcgtatgggttacccagtgagaacagcgtgtatcgctgattactcttgttcatcgcattaatcaaggtttgatactcactccaaccgaactggctggccacattacgaaattggtaagaagcaagaatgacataattggctttgccaatcgcctggagcgtttcattcattttgccttgaccaacaagtgatatttcagtctttaacgacaggttattagcggcttgcaacagttgtttttcaagctgtttcgcctgttcctgttcagctgcgacaataacaacccggtcgccttgcttcattggatcaggaagcacaccttcacgactgctgattacagtgaccgctcgctctgcgattgtctgctccactgctcggtgtgcctttgatccgatgataccgttaagctgagttagcttttgcgcaagagtttgactgcgttcaaataaaccatatttcgctttcatctccaagattcgtttcacagatgcatgtatggtttcatccttgatcgttccattgttcaccgcgtttaccagcgtttgatgggccgctgctgaattttttggcataaggatgatatcaacacctgcggaaacggcgcgttctaccgattgattctccccaaaatgctctgcaattgcattcatggtaaatgcatccgacacaatgagaccttcgtatccaagctctccgcgaagaagtcctgtcagtacctttttcgataaggtggcaggaatcggcacacgttcaccgtctttgagcgaagtgacatgttcgttgtctatggcagggaaagcaatatgcgcggtcataatcatctctacaccatttttgatcgcagcccgaaacggttttaattcgaccgcatcaagccgttctcgggcaagcacaggcataccaagatgggaatctaccgttgtacctccatgtcccggaaaatgcttaactgccgccatcacccctgattgctgtagcccttttattgttgccagaccaagccgtgtcaccaaatccgcatccgagccaaacgaccgtataccaatgatggggttatctggattgctgttgatgtccagcactggcgcaaaattaatctgcagtcccagtgccttcagctcctcccctgtcagctgaccagctgcttcggctagtgttgcatctccagttgcgccaagcgccatctgaccgggaaggttcgtacctcctggtattcgtttaataacgcctccttcttggtcgatgctaagaaatagaggaatgtcacctgcttctctttgtatatcatgtgtgaacgttgtaagctgcgtcacgtctgcaatatttttgtcaaatagaatgagtccgcccaagtcctgatcatgaatagtgcgcttcagcccctcattgacggtcgttgtcgctttattattccattgcctaatgtcgggcataagcatctgaccaacttgctcacttaccgtcatataggatatcagtttgtcccaatcttgtgtccgaatggccacttcacgttcgaagcgaattactctcgccataaatacggcatattcagcacgcgtgacagcttgattcggacggaaggtggcatctgaataaccgccgaccaagccgtttgaactcataataagaatgggtgctgctgcccaatgcctgtccgtgtctgtccattttgcggcgttcttaccttcgacgagtgcatatgcccgtgtaaggaaggccgcagtctctgcgcggctaagtggtgcgtccggacggaaagttccgttaggaaaaccacttgcaagaccatttttagcagctatcatgatttctcgatggaaggggtgtgtagttggaacatccgaataggttgtaccttccactgctctttgaagctgatctggataaagctcgcgaaccataaaagtgacggcttgtgcccttgtcacaagtgcctctggcttgaagatcccattgccgtatccggctactgttcgccgtttcgccatataagtgatgccatcctctgcccacttggaatactttagatcaacaaacgtttcttccgcagctgccgttcccacccctataagcatagagccaacaacggcaccaataatcgtcatccattttacatgcatttgtttcactcctgttgtattctatggatgaatagacgctgatacggtacagtttgttgcgttttcataagttcaatgaaattatattcaggtcatgactatcccttcacgccaccaatcgtcataccctggacaaagtatttctgtaagaacggatacaccatcagaataggaacacttgcaataatggtcatggtcgctcgaatcgaggttggtgtgaccgccgttgcattgctctcggcagactgataagcatcacttgctgatgaagtcgctgaggttgtcgaagtttgcagaatcttcatcaattcgtattgcaatgtgcttaattctttattggaagagttgtacaggaatacatcgaaccaggaattccattgtcccacagctacaaagagtgatacggttgccattgcgggaatcgttagcggcaggacaacgcggataaatgtcgtgaactcccctgccccgtcaatacgggctgactccagaatgccttcaggaagaccttcaataaatgaacggatgacaatcatattgaagacaccgattacacccggaatgatatatacccagaaggaaccgatcaatccaaggtctcgaatcagcagataaccggggatcaaccccccgctgaaatacatggtgaatacaaaaaacatcgtaacaaacttgcgaagcacaaattcctgacgactaaccgtatacgcgagcatggctgtacagaagacggacaccacggttccaatgatcgtacgcagcgccgagatcagagttgcgtgataaatatcggattcgccaaaaatgtatttgtagttgtccagtgtccatacacgaggccatagatatattccaccccgaatggcatcatttgcattattgaaagatacggcaatcatattaacaaaaggatagatcgtcacaatcatcagacataccatgaagatgatgttaaaagtgtcaaacgctcgatccccggtgctgctattccgcaagcgggatgtgtttcctttacgcatggcataggcctccttttagaatagtctgctctctcccatttttttcgctatatagttcgctgagaaaaggaagatgaagctgaccacagttttgaatatgccagctgctgtacctaaggaaaagttccccatccctaatccatatttcagtacaaagatgtccagattctccgaatagtccatattcatcccgttacccagcagatattgcggttcgaatccggattcaagaatacttcccatgttcatgatcaacaagatcacaataaccggtttcaagccaggcagggtgatatataacatccgtttgaagcgactggctccatcaatctcggcagcttcatattgcgcaggatcaattgccgtaatcgctgccagatagataatggtgttccaaccgacatctttccagacctcagttgcccccaatataccccagaagtattctcctttccccatccatagtaccggactgtcaatcaggtgaagcttcatcatcagcagattgataattccgtctggtgacaggactgttaatacaatgctggacgcaacaacccacgagataaaatgaggcagataactgacggtttgcacaaagcgtttaaatatgacatttttcaactcattcaacaaaagggccagtgtaattgctgtcacaaatcccaacaccaatttaatggaactcataacgagtgtatttcgcagcacccggtagaaggtattgtcttcaaataacgtactaaaatgttgccaacctacccattgctgatccgagaaggaccttgccggtttgaaattctgaaaagccatggtccatccccataacggcaggtacttgaagataaaagcccagatgacaaaaggaatacacatccaggcaagcgttcgttgctgcacaagtcgcttaaagaacgagtgtgctctggttcccttcggactcgaggccggaggcatcgagttaagggagacattaggtttctccacggtgaacctgctcctttcctgtgctgttattcatgcgaggagaagccggagtttatgctctttcgtcttctcctgcgcatgtaacagtttgttttaaagaggttgttcaaaaagtccgcttttgattacgaaagacgccttgcggcatcatcagcatcgaatatggaattcagccgaaatgtccgttgctcacgtagttttccctacgctccgctactccatttctagcttcatcccatcttcttggtactgaaaaccggtcttattgaacacgcacttaaagtgttcgtattaccattttcctgcaacacgatccttcacaactttggtaatggtcgcttcataaccagctttgtccaatttgttcaattcagccatgtaggcatcccacagcttatcaaaattcgatggtgctcccaagatcatttccggtaagtatttacgttgcagatcatccgatttggtggtgaagatctgttcaggtgatccttgttcaagggcgatggaccatgcggggaaccatggccgctcttccggtttgttaaacaattcactaaaggtttggataccgtaggcttcaaggaacttcttgtctccctcggtgtaagatgcagcggctacttctggctggttgccagggctataagcgttaccatcggtaagtgtagattcaccgccatatcgcggccagtctgatccgaagtaagtgaacccgaatttacggctcagctccagatcatcatgggctttgcgttgatcctcatttgcaaaatagaatcgtcccttttcatccacactgtacgtctcgtccttgattccccattgcaccagaacctgattctcttccttcagcaaattatcgaaatatttaatgatacgaacagggtctttggcattcaccgagatacctgttgcatagttgttgacgaagccgggaggatcaacatactgatccttaattccttcatcaaacacaatcggaagtggtgcataacgcttctcatcaatgcctgccgagagtaggtttttcgacgcgtctccaacctgccagccataattgaagtaccctaacacacgacccgaagtcagcttagccaaatactggtctttgttcatcgtaaaggattccggatcaagcatgccttgagcattgacctcatttaacttctgaatccattttttctgggcatctgttccagcgacaacttttgcctcatgggtagtcatgtcgaccatgacactgccatcgttcggataaccggcaagatgcatcgctggattttgcagtgtgaagaagttattagccacacccgcaagtgacacaaatccgatcgtctctgcaccgtcgacagttggatgtttttccttataatcctgaatcagatcaaaatattcatccagtgtagtaatcttgggatagtcaaactccttgagcacagagcgctgaatccagaaagctcctccgcccacatttggactacctgaatactcaccctgattagccgtataaggcagcgcatagatttttccgtcttcggcatttttcattttatcgaaatatggtccatacacccttttgatattagggccgtattcctcaatcagatcatccagcggaatataggcacctgcatccagtaacttggacatctcaccactggagctaatgacatcaggataatctccactggcaatcatgacaccggcttttgtagcactatcacctaccagatattccaacttccagtccacacctgtctgctcttgcaacgctttaccgatggttgtttcgcttgccagaacatccttcttgcctggagagaacatgtaatacgagaacgtgactggactgttctcatcatcacctgtggctgaaggtgatgatgacgagttattctgactgcacccagccagcaaaactgttagtaatacagctaaacccgctgttctaaatttcggttttaacatgtgaatattccccccgttccgtgttttttcttatggattacactcaccatttgccagctacacgatccttaactgcctgtgttatcgtagcttcgtatgttttcttgtcgagttgattcaattgactcatatattcattccatgtgttctcgaaagtggaaggcgaatccataatcattttgggtaaatatttcttctggagatcttctgccttggtgatgaaaatctgttcaggagagccctgctccaatgcaatggaccaagcaggagaccaaggacgctcatccggtgtgctgaatagttctgtgaatgtctccacaccatatttctctaacaacagcttgtctccgtccgtgtaactaaaggtagccacttctggttgattccctggtccataggcgttgccatcctccagtacggagttattaccgtaacgaggccagctgtaattaaaatagtcaaagccgaatttacgacttaattccggatcttcatgtgccttgcgttggtcatcatttttaaagtaaaagcggccctcatcattcacactatacgtctcgtcctcaataccccattgaaccagaatctggttttcttccttgagcaaattatcaaaatacttaataattcgcacgggatctttggcatttacggtaattccgacaccgtagttgttcacaaaacctggcgggtccacatactggtctttgacactgtcatcaaatacgatcggtagagatacgtatcgtttatcgtcaataccagccttcttgaggttgttcgttgcgtctccaacctgccaagagtaactgaaatatcccagcacccgaccggacgtcaacttggcgagatactgatcctggttcattgtgaaggattctggatcaaacatcccctgtgcgttaacctcgctcagcttctgaatccattgtttctgataatcagatccggctaccagtttggcttcatgactctgcatatccaccatcacactgccatcgtttggataacctgccagatgcatagccggatttagcagggtgaaaaagctgcccgattcaccagcaagtgtggcgaagccgatggtttcttttccatcgatctgcggatgcttttgcttgtattgctcaatcaagtcaaaatattcgtccagcgttttgatcttgggatagttaaactcttttaacacagcgcgctgaatataaaagccagtctgaaaattaggctctgacacataaccgatgttggcagtgtatggcaagaagtatatctttccatcctcctgtctgaatttgtccatataagacccgtatacccgcttgatgttaggcccgtattgatcgatcagttcatccagcgggataaaagatcctgcatccatcaatttggccatttcaccactggagtcgatgatgtcggggtaatccccactcgcaatcattacacctgccttggttgcaccgtcgcccaccagatattccatcttccagtcaacgcctgtttgctcctgtagcttcttgccaatggtcgtgctgcttgccagaatgtccttcttgccaccgccaaacgtgaaatatttaaaggtgaccggggtgttgtcattactgtcaggataagaggcttccgggctggctttattacaacctgccagggttacagccagtaaaatggccagacctgttataatgtttttttttctaaacatgtagcaaatgcccccttaaagtattgtttgtgtctttaagccttctcaatatatcaagatagcgctttcaaagttacccatgaaagtgtacctcctactttgaaaagtatatccctcgtatttagtcgcctggcatggctgatggatcaagtggaagcttaatttggatacgcgtaccttctccttcccatgtctggatgtcgaatgtaaagtgatttttataacaaagttttaagcgactatacgcatttttcatgccaacatgctctcccatatcggtgttttgatccaggtaacttaacaactcttctaattttgcttgtgacatccctataccgttatccgttagtctgatatggagctggtcatgttccattgaaacaaagagttgaatgatgcctacacccggagatgactcaattccatgaatacttgcattctcaacaaagggaaggataaccatcttggggattcggtacatcagtaccgcaggatctgcctcaatggtatattggagtttttctccaaagcggtatttctgaatttgcaaaaaactctcgatgagttccaattcttccttcactgtcacatcattctgattccaactaatcgacttgcgaaacatcttggccatgttatgcacgattttggcagtctctttctcgcctttgatgaggctccgcatacgtaccgactccagcgtattaaacaaaaaatgtgggttgatctgactatggagcgcatgaagttgtgcttcctgctgcttcaactccaggtctttcttttggatgtcggcgagatatacctcatgaatcaggttatggatcgtctcggtcattcgattaaattccatcgtgagttgacctatttcatctcttgcatcttcaggcggaatcgtctgaaaattctgtgtttttacttttttcatatgttttagaatacgcaccagcctgacatggatggatctggacatcgccgcgatgataatagaaggcaggacaaaattaatgcaagccagccatacgacgaaggaacgggacttccgcacctccttcaacacaatttcttcatccatcactccatgtagggaccacccttccagatagttaatgcctgtatacgtaagttcaaagggaatcattttgttcggaaactggatctcactgtaacgtttccctatctgagcttctgctgtaggatcatttgaaaattggatgtgtcctcccggatcaagaagatacacttttccatcaaatccgctgttgtggaaatactgcttgatcatatccatattcaggtcaattttaagtaactgctctctccccccagtgtccagattgtcgagcctttgaaccagacttaacatctgatccgatgagatcaatgccggataaggggcggagtatgcctgaaattgaacgtaccagtccgaattgcggacctcgtcagttaaacgatcaatataaccggaagataaaatggtagaattatcggtatacacttgataccagcgaatcccctgattcatttgcccggagaattgcccttttagataggaattataagcgtcaatgtactcaaaatgactttgaaatgaacgggagatggtgtcgttgaatacagggtcagtatataacgaataagagaggccgacgccctgatcaatggttacccgcaggtcattcttcagattgttcagtgccatgccggcatcacgagttttctgactgcgaatattggcagatgtgacattgtagaacaccacattggtaacaacgatgggaataaacacagataagacatacataagcagtagcttatctcgaagcttcatgtaattcagattccatcttggcattgtgcacctcgctgctcatttcccataaggagattgcgatactctgtaggtgataacttaaccaatttctcaaactgagttacaaaataatccgcattctgaaatcctacacgtgcagcaacctcgtacattctcagatccgtctggcgcaataacttcttcgcttcatgaatccgcaggttgagcagatagtcattaaagtattgattgtaacttttgcggaataatcgcccaagataaacggggttcatgtagaagagcgcagcaatgcttttgagattgatgttctcggtataatttgcatcaatatatcgtttgatcttgctgatatcacctttggatcgctccatccgcagatgagagacataatcctcggcttcctccaacgcgatgagaaaagcatctttcaatagtcgtaaattccaaccttcatgactttgttgtgccagctccttcagttgttgcaacccttcatcattaccacccatttcgtggaccacagcgagaatacccgttatataacgcaaaagagaacctgatacagcctgagaagaaaatcgattcatatgaaacaatttgaatttctcttctacaatctcgtgataagctgacctattcccctcttccaggctcagaattaattgatccacctcgtcttggtatacattaaaaacaaacagcagtttgtccttgatctccgtataacgtacgacaccaccagtttcagcatatttatgcttggctgcttcttcagccgccataagggattgtgggacatcaccaatttctttgacaagtgttcctgcgtaaagaccgatatccaggttaaaccttttgctcagtgttatatgaatattatgcagtttatcctgcaacgccggacccccttgatgatgatcaggccacaacagtaataaagcaaacgtgccgcgttgttgctcactgatgaacattttacataaattactctccagagaatgtactgcttcacgtagctgttcaatggtaattttaattgcatctaatccggtctgaagttcaatcaaagtcatgagcagactggagttacgattgatcccaagcatctcggcatatcgatgttcatcctccttctgtacatggcctttgatcacatcctccagcatgatgttactggcctgtccctcagccaaaagaatatgttttcttttattgcaaatcagattagctgacttctgcaacgtcgccgtcagttcttcatcatcaataggcttcaggatatagtcatgaacaccgtacctgattgcctgctgtgcatatttgaagtcatgataaccactgatgataatgaacacaggttccagatgtggcattttctctacggcacgtatcagttccagtccatccaggattggcatgcggatatctgttataatcacgtctggttgcaggctttcaatcagatttaatgcctctgcaccgttctctgcctctccgataatctccatgttaagatccatccaattaatgagttcatacagcccttttcgtacatacatctcgtcatctaccagtaatacttttaacatccgtgtgtcccctttcctccaacgaaaataaaccgccggtagcgtctctccctatcggcggaatgaatctaatatggtgactgttgtagttattgcataatacattcattcatgtcgtgcataatcccaatagtcgccaacgaggccttcaatgatcgatccactggcccatggcatcaggcaaaaccaggtgctggctggtgtaccatccgcatatttttcagtgaccagtccttccgaatgacagaagcgttcagacatccatccttttttgccatagccgaattcttgatcataacgattataggtctgacaaccccacccgatggtatccatcatacgttgacgaacataattctcttcccgctgtccaacataatacaacagctcatccactagattgctggacatggggtgaatatgcggattagctactgaagtaacacttcccccggaactggaccagcctaatgtactgagtggcggaatcttaataggtgagttgtaacaaaatttgaagctgaattcataactgatcgcatctctcatgtgatctagatacagctcgtcaccggtcaacgcgtgcagaaaccgaacagctttgatgtaagccagaataccttccgaatcaacagctttgtccgcatccagcggagcgccgtaacattccatatgttgcacataggtattgtaatagtgggcttcactgcgtctgagctcatccagagaagattcatcatgggttaaccaactgtaatatgccttggcagcaagacaccagactccactaaaagcatcatattcaagacctgctccggtccgctctgacaaaatggtgggatattctccatccgtgtttttcgtgcactccagacgatcaagtacttgcttgacgtaagcaagccaatcatcgtgtctcacatttcgaatgcgcttctcataatcgtagcttttcagaatgtagaacatcgcttgagctacaaggtaagaggaatgtcctggggtacgcatgccgtcgaaccaccagcctttaacactccagatcccatcctgataagcgtcatacggaagtccggattcgggattcatggcattctcgataatattggtaatacaggataacgcctgctgtcgcatgggctcattattcaggcgcagtgcggccataagcattggtgcagcgatggtcataccatttgtccaactgattgagataattttgttgtatcggtagccaccggtttcagcagcatcttcatatacaaatgtagagtaatgacgatcctccggaagccaggcatactcatagatggcattggacaaatccgttaccgttgtctgagtgtcacttccttctcttggtttttcgtgatacctcttatagattgtttccagtgctggattgatgcccagttctgattcagactcgtagttatatagttcaagtgtgagcccaatcgattcacctgcagcaagttcaaaacagttttctccaagggcagctcgctcatggacaagtctggatttgataaataacaacggagcattctcatatcccaacgtatatccgaccgtaccctttttaatagaacatgagaatcccccatattgcacaaagtttccttccattcctggataccattgctgcttctggtttcctgtattgatccagtagggacttgcgcttagaccaacaatccgaccttcatcatagataagtgcagctggatgagacagacgatcacttcttaccatccaccagggtgatgaaggacgagaaggactgccctcccttagcctggggaactcatttggaacattctgaggtgcttcgccccggttgcggccatacataaatgcaggtaaaaaaaacctcggattctgtttgtccaacggcatttccacatgaataacccctgcccaggcattctggccctcgttgtaaatctgaatgtcggcttgccatgggtcttctgcactgccgttcccgcttgttacttttacgtcagccttgagagcatgcttattcaatgccgtgtactctacgttgtcctgcgctctacttctagccgtgaaaatcagatccatcttttcctccaatcgcgttgtacacacctgagtggaaacgcttgcaattatgtatccatcatgctaggatggttacattttataggttcacgtctgcaatttcattgcacaaacggctatatttattgcgcgaaacgacaaggaggtcatatatctgatatgaatgagacttcagaatacctgtttgatccaatccagaatgagctgttgtaccttcatcgcaccaccacgtataatatgggaacgttttatcatcgacataatgcatatgaactctacttgtttcttcgtggcaatgtgaatttctatattgagaaccgttgttaccatttgcaacgtggagatctgctcgttcttaacccggaggagatgcaccgttcctttgccttggacaaaaacgaatatgagagaattaccataaatctgaaaaagtcatatctgaaccgcttgtctacttcaagcaccaacttatccgcatgtttcgactaccgtcccaagggtaagggtaagggtaatatcgtacatcttgaagaggacgaacttcaacgagtgctacaattagctggcgagcttgaacagtgtctctcatcaagtgactatggagcggatattctgaggaatattttgattacacagctacttcttctaacgaatctaacttttcaaaatacggattttgttgcaacggatattatgcctgaactagttcgaaacacgatggattacattgaatgtaatctgacgaggcaactgacgctcgaacaattgtcagaggctatgttcacgaatagcagctatattagtcggcaatttaaaaagcataccggactcacgattcgagcatacattcttagtcgccgtatagagctgtcgaaatcttatttaatcgaaggtttaagtattacagaggcctgttatcaatccggttttggagattatgccaattttattcgcagcttcaccaagcaggtaggcacttcacctggtaaatttgttaaatatggaagtcttctttaaacattgcattaagcaaaacacgccaactcttgcctatatcttatattatctcagccaaaaaaaagagcgaagaccggcagttttgtcagccggcattcgctcaggtaatcagtaagttcttatttgttattccagtcgtatcctcttagttcaattattgaattggggccaggaaaggttaattctatcttttggtccagataggatacggttactcttgattctgcaatagagcgaattctggtattgaatagacgaccattattccattccagatctatttcaaatccgccacgagcccgaataccacgaatatatccttttggccaagctgatggcaaagcaggtaacaatctgattacttcgttatgactctgaagaagcatctctgctatccctgcagtacctccaaagttcccatcaatttgaaatggaggatggtcacaaaacagattgggtaacgtggaggaacgtagaagttccacgatgttatcgtgtgcaagttccgactcctctaatcgtgcccacatgttgagaatccacgcccggctccatcctgtgtgtccaccaccgtgttccagtcttctgtcgagtgttacacgagctgccttggccaggtcaggtgttgattgcaacgtaatttgcgttccaggatgcaaagcgaataaatgggaaatatgtctgtgaccaggttccaattcatcataatcgttactccactcttggatctggccatgtttgccaatggaggtctccggtattttggttaaagcaccacggagtaattctccaaattcctgatcctcttgcaatattcgggtactttcaatgcaacgcgtgaagagttctctaataatctgattgtccattgaagcaccaaaacataaagcccccgactctccattatctaatatatagcgattttccggtgaggacgaaggacatatcacccaattgccggtaggatcctctattagataatccagaataaacatagccgcatctttcatcgtggcgtaagattttttgagaaattgaacatccttattgtattcgtagtggtcccatagatgtaatgaaagccatgctcctcccatagtccaaaaggtcgatgtcatgcatacatcctgcggagcagcgtctgcccagatatccgaattgtgatgagcaacgaaccccttgcaaccatacatggttttagcggtttcctttccccggacttgcagtcgatctataaaatcaaacaatggaacgtgacattcagacagattgcagctttctgcaggccagtagttcatctgtgtattaatattaatcgtatatttgctatcccatacaggaagcatgtctttattccatatcccttgaagatttgccggtaaagaacctggacgactacttgagataagcagatagcgaccaaattgaaagtatagactcagcagttccggatcatgctgaccagctctaagccgctcaaggcgctgatcgattggaagttcggaacatatcacatctttattttcatcttcgagatgtatatccatcttttcgaataaggattgatagtccgagacatgatcggcgagcagttcgctatatggttttgcggaagcagtatcaatcctgcggaggcactccacttcgagttgttccttaggtactcggaaatccgtgcaagccgtgattagaatagtcgctgaatcaccattcttcagagaaagctgaccgcttgaataatgaacctgccccccttcagatataaggcgaatcgcacaacaaaatcggattccttcttctcccccacttcttccccgaatgatcaagttattcgttccacgcttctcgatccggtccagataggattggaaaccaacaggatgcttaagaatatctgaataggatgttgattccagaacagctcccctgccaaaaacagtggagaaagataactttccaggcacgcttgatttgagatgaacaacgagcacttgatccgggtagctagcaaaatattctcggctgtaaatggattgatctgccgtataattcacgtttaccttgccttgttccagatcgagatgtctttgatatccatttggttcatgttcactgtgatccatagcgatatagaagtcccctaatggctcataatgcctttgcccgtcaggaacacctaccagagtatctgctgcgagttcttctgcttccctaatcttagcgtcaaagatcaggcttctgatctgagataaagattcaagtgcttgaggattattccgctgcatcggcccaccataccacagactatcttcattgagctgaattctctcgatctgtgttttcccaaaaatcatgccaccaagagttccatttccgataggcaatgcctcttcccatcttccagcaggttgattaaaccagatatttttggtcttcacgttaaaacctccaacgaattataattcctcacatttttcatgtttagtgtgttccgtttgtatgttctttcagtgtactgtaatctcttaagcaactaaatgaacaaaattaacttgaattatcacaatcttatcccagtattagaggtataatcgtaaattcggaaacggacagtataggtaatacattgatgatcctgatgtgtacaaggttgacattcagtccacgaagtttcaaaataaagtttagggaggttaaataaatggatgataaaatgaatgatcaaggtggtacctttttttcgattaagcggatttctcgtgacttaacccatctcaccaaccaaatgtgtgctaaattagaagacggactctcttctgctcagatagatgtattacgctgtttatggaaaacaggagatggacttactcaaaaagagatattggaaaagttaaatatccgtcctgcatcattatcaaatcttattgactgcttggttgcagggggctgggtgacccgaaaggttgattcaaaagatgcacgtgtaaaaagaatatttctcacagagacaggcaaagcgcaagaggaaaagaatttgcatacaattgatgttattgaacagaagatgcaagaaggatttacaaatgaagaaatatccttaatgcgagtctggctaaaacgaatggaaaaaaatataaaaagataagctattgacagaactcttaacttcactttattatttagtttacctaaataaatattataaagagtgagattgaggtgataagactttaaaaaattgaaatacttgatatgttacactgttatattatttagtttacctaaacagttatttatgtagtagcacttggcagtaaagctgttacaaagcgtcattgtattaacaacgctcccaatcatcttgaaataagcatactgcccttctcgctggagtattcaaagttgtgttttattgtccaacattttcagaattacaaattatcgattacaaggtggagtactaaaatgagtaaaacatggaaactacaaatatacttgctgaccctgatcagtcttttagttggcacttcgcaaaatgtctttgtgggcattttggacaaagttgctgattatgctggtgtaaccgtctctgctgcgggtcagcttgttaccctatttgcattagccaatgcaataggcacgcctatcattatattagcaacagcaaagttagaccaacgtaaacagttgatattggctctcgcattaactgttctcggaagtggtatgacggtcattttttctggtttcggatttttgatgctgtcacgcattgtactcggagttggaatgggagtctttattgtcactgctttttccctcgcagcaaaattatcaccacgaggtcatcaggcgagtgccctggctactgtgacaatgggatttagtgcttctcttgtcatcggagtccccataggccgtttcattgctgcatcattcgattggaagataatttattggggcatcggtctcttatgtcttctagcaatttttgccgtcgctaaaatgattcctgcaacaaaaaacgaagcgccagttcctctcggcaaacaactcgcacttttgaagaattcaaagattactttctctctctgcgtgacattctttttatttattggatacgcagtgttttatacgtatattacgcctttcctgaataccgtctcaccgatgagcgaacgagcattaagtcttactttacttgttctcgggattgctacattaattggctccaagctcggtggatttatgacggatcgtttaggcttcgcccgtacactatttttcggtatgtctgttaatgctcttgctcttataatgctctctaccatagcagggtcgtatattgtcacttttgttttgcttatggtttgggcaattgctgcttggacatcagggccaaccctgcagtacaacctcgtctcaattgctccagaagcgtctggaattatacttagcttaaacagctccgtcctgcaacttgggatggctacgggcgcagctttcggagggctggtcactgctggattatccattcaatcagtcagtttggtagccgctacttcagttgtcgttgcaattagtatttttgcaatttcattcgctttgttccgttccaatgccaagaccagattaacggataatacccatgtttcaacaaacgaaacaagttaaaatgaaaggggaagatatacatgaaagagaaaagacaacttaaaatcggtggtaccatagatggagttggctggaactatataggttggcgtcacccagatatgcccgctaatgctagtgagagcatagaatactatgtacaaaaagctaaaagattagaagaaggaaagtttgacaccatctttttaactgacgtcagccatataggaccgaatatgatcccgcattatctaagtatgttcgaaggtgttactattctctctgcattaagcatggtgactcattcaatcgggctaactgcaacaattgccacttcctatgcagatccatttaccgttgcccgacagatggcttctttagataaaattagtaatggacgtgcaggctggaatgccataacttcaaatccgggtggattagcaaattatagccggacccatctttcaaaagcagatttgtatcctatgaaaaaagagttcttagagattgttgaaggcctgtgggactcctatgaggatgacgcttttattcgggataaacaaagaggtatattctttaattcgaaaaaaatgcacgctctaaactttaaagggaattatttttcagtggatggtccgttaaatattagccgttcgagacaaggaagacccgtgattttccaagctggctcctcttcagatttcatgaatattgctgcaaagcatgctgacggagtatttctcccttctgatgacttagaagatgctaaagcattcagtaatgaggtaaaaagaagggtcgcattagaaggccgatcgcctgttgatttcataattacactctcgcataatccgattgtaggacgcacagaaacagaagctgaagaaaaatttcaagaattagaaagtttaatgcctgggtacagaatacctaaacctaaattttttggttctgcagaaaaagtagcggatcaaattcaacaatggtatgaggcaggtgcgatggacttattgaagatcagacaggagcatccttcaggattcgatgacttcatcaaatttgttattcctattttgcaagaaaagggaattttccgtacggaatacgaatcaaacactttacgtggtaatttaggtttgccctatccagaaaatagatattcagtttgaaaaagaatagttgcaactgatgtgaactcgtttatatcatgattaattactaaataatcagtcgaagcgttttttgaaacccgttaatctgtgatgtgatgattaacgggttttttgttgcggaatatcaataaggatctgtattgaaggcttcacctgtcaagttcgaaaacttcacgaaaaacatagattctggtgcaaggatggatacaaactcatccccagaaatacttatcattcttctgtaataatggtagatattgcttttttactcaacaaactttttctccctgctgttgaaattataataatatcatacctatcaaaaccttcgattatgcctttaagatgaacaccattagtcgttataacagtacacatcttgcggtaattctggaaattttgcaatagattatcttgtgtattgtcttctaactcaaattgtttattagacattccgttatccctctctctcactggtattggaatggattttcttttcatcaaccaatctggatggcgtggaatcattaccttcaggatcaaccacagatactgcaaacattgtagttagaagtcgtcctcggatcattttcaagtaattttgccgaagttccaactgttctgatttctcctggtcggtcagttcactattcctttgttttcagcttaattcattagttctgtccagatatgggatcagcatgttcatacgatcctctatttttagtttgtggaaccaagcttgactacactcgggaattatatttagcaagctaagtatttattgaaaaaatagagagtcacactatattcctctccatttgttgcatgaattgcctcaatatcagccgatcttccgaagaaatggattgaagtagtttctcttgctgctctctccatttatgctcaaccggtttttctaattctttgcccttatcggttagaaagatacgcatgatccttgcatcctgtacatcacgtttgcgatatataaatccattctgctccagtgatttgaccatgtttgtaaccgttggtggttcgcatttcatatgttcacttagttgcatctgtgttaccccatcacccaaccacagccgatacaacaaattatcttgtcctacatataaattaagttcccgaagagattcactatagtttcgacgcatttgggaggaaattcgatctaaagactgtcgaatttcacaatctactatatttgtcatgaacgattcctccctaacatccgaattatatttagcagactaaatgtatcatggagatatacaggtgtcaattcacctctggtaacaatgaaactaatagtcttggaaggatgaaattaatggtctgttgttgcttggctcgccatatcgttaagttgcgttacaaaagctccttcattcggaccttgattatcacgaatcattttcgcttgttccacgagaacttcttcagcatccgtaccgagtaatcttatggtttctttaatgaatgcttcaagtggcatcgcatgtggatcgtcactaagatctgccatgagttctgtttgaaccccaggtggtataatttctaatacttttactgttgtatttttaagcaaataacgttgtgataaggtataagaatggagcgctgctttggtcgcggaatacactgcagtcgctgcgtacggaataaacccgattgaagaagtcgtattaatgatcacagcttcttctttagacttcaaatgttcaattaatgaagatgtcattcgaatgggtccaagcaagtttgttgagaccgttgaaaccagaacctcttcgtcaatcacacctgcagcctcatcgaaaagcatgatgccggcgttattaaataagacattcaactcagggaagtcccgaataagttgcttagccgttgcctcaatactggaaagatcctgtatgtccagttcaactgcagacattccgggattagcactaagtacttcctccagacgctcttttcttctacccgagatgattactttatttccaagcttgtgtaaagcttctgccaatgcacgtccaattcctgagccgccacctgtaatgaagatcgtgtttcctgtaagtttcattttaaaatccctccaatatttagttttcttaatcactttgtagttttattatttacactgttagatgaaatcgttacttactattaaccttgcactttaaagtttctgaatggactaaccaccttcttagtattatactattacaacaatagttgctttagtagttcaattgtatccggaatatcattgaggaacaaccaacaatgcgagtcttttgttggtttaaaaaaagggagatagattcatgggacttaaagtaagaaatattcgtacaactcgaacaagagaatccattttcgaggcgcttttcgaactgatggaagaaaaagattttgataaaatcaccatacaaaacttaacggaacgggcccaaatcaatagggcaacattctatgctcatttccaggataaatatgaattgttggatgagattataaaaaaatcagcagaagaacttattcaacaacatactaatggtgtgtgtgcatttaccaaagacaatatgatgcacttggtattcgcagcatttgagtatcatcaacaagtcaaaaagaaatgtcgaagaaactataataaaattattcctcttctctcttcaaaattagtcattgcacttaagcagtatttggatctttgtatgcaggacataaactctgatgaacgtactttgtacgcacaaatctatgctaacatgataaatgaagcagttactctgcatactgcggaacaaactaaactaacagaacgaagtatagcagagcatattgttcgaatgatgcaccaaaactaaacgataaaatgagagcaacatcagtagccactgttactaatgttgctctcattttatctcatagttttgaagaggcatcaaaccaaggaattttaggtctgcacggtttcagcctacaatagcttttcgtcaagtattcacactataattctgactcatatcgaggaaagcagatcgaaagaatgtgaacaactctaaagttcaggaagattggatttatcgttaaacttattttttggcaaaaccttgcttgttcaaataggccatcatttgcggctgaatacttctctcgaggtgatcctggatatggtcactccatccttttacttttttcacagtgaaaggggctctcgtcggtcgattttcataatacttcaacatcgtttcatcatagatagctaatttctcttgatcaagagattgatactgattctcaagtaaaaccatggattgaggcagccgaggtttaagctcaggtttatctccatctggatgaccgatgcacagccccactaaaggaatcacatatttcggtaaacctaatacatcagatagctcgttaatatttgctctgaccgcaccaatatacaccccgccgagccccatggattcggccgcggtcaatgcattttgtgccaccagtcctgcatcgaatgaaccgattagcagaaattcaatatattcgatatccacatccggagcgatttcatgatttcggttgaagtctgcacagaatatccaaaattcggacgcttcttcaatataaggttgatcaacacagagatgtctgactttttttcgaagcactggatctgtgattcgaataatggataccgcctgcagaagactgaacgatgaagtttgattcgctgcctgaaatattgcatctatttgttcctcagttaggggttgagatgtgtaagaacgaaacgatgtatgattatgaagcaattcgagtgtgttattcattaaaaacctctcctttattctttgattccatattctctcgtaatattttccttcatattctttttggttaggattagaaatattgacgttcacctgtctgtgctgatttttcgacggcatccagtaactgatgaagtttcaccgcatctgcaaaagtaggtgctaaggtcgtaccttcctgaatatcttgggcgaacttacgataagcctgagccatgttcagaacaaatccggagtcgttatatagagaatgtggagccgagtaataggcatcgggaatggttagttcgcgaagctcgttgtccgtagatcctgcaccgcgtaattgatgtgatccgaattgaatggatgcaggggcgctcagaacaatcgtgccgttgtctccgaagatttcaagtgtaagtcctgtctgatgtttaactccaccttgaatatggacactggctgctgccccattagtcaatttccctgtaatcatgatctgatcatccgttgttttcttgatgactttctgaatatcaaccaattcaacttctggaaactgttgagctgtggtagcagacaattctgtaaagtccccaagcatgtaagtgaaggcatccagattatggccccctacaatggtcagcaagttccctccaacttttcggtcatacaaatacgcagtcgacttgtcaccaacgccacccatgccatctatagcgatcttcaggttggcagataacactttaccgatataaccttctgtcaataaatcttttacatattgaatggccggggcttgtctagcctgtaatccaatcgcatttggcagttgggtagatgatacccattcctgcatttcaagcgcttcctctgtattcgaacccaaaggccattcacaatagattggtttgccagcaggcacgacggctttaacggcgttataatgttccttgacgttaatacttacaacaaccatatccacatcagggtgctgagccaactcctccatattatcaaagccatgatctgcccggaaagcttctgcgcttttcttcgcactagccatattgcttgtccccactgctgtaagctcaaactcatccaaatgctcaatagctggaatgtgtgtaccactcgcccacccattattaatggaagccctatgattcctgtacgaattttcttactcaatgtataacatctcctttattttaaataacaaatttctgattgttacttcgtgtattgattttcagggtaaggtagacctaaattcccccgaagtgtgtcatcctcatattccttgcggaatatgcctttatcttgcaagatgggaacaaccaatttaataaagtctttaaatcctgctggatgatcttgtctaatgagcaagatatccatgacgcctgctctataccaatgttcgatttgttcggcaacgtgctccgccgatcctattaacccaggtttcggcattcgataaccttgtggcatccatgattcgatttcccttagcttttcgagagcctctttctccgttttaccaacgatcgggttgtgagaaggcatcatcaacagatcatgtggtgaacgcccttgattttgaactttacgtgtcagttcagcagtgaatgccttgaggtattccagatcatgtccaggtgccatgatgacttcagcatgctgtgcagcaatatccatgaactccggggaagtgccggcttgaaagaccaccggtctgccttgcttcgatcgactgatatttaaaggaccctccacggagaagtaattcccgttataatgtagaggatgcatcttacgcggatcataaaataccccacgttccttatcacgtataaaggcatcgtcttcatacgaatcccaaaggccttcaacaatttccaaaaactcttttttcatgggataaagatctgcttttcttaaatgggaccgactgtaattggctaaccctcccggattcgaggtgatcgcattccaccctgctctgcccttgctaatcttgtcgagtgaggcgatttgcctggcaactgtaaagggatcagcatatgaagtcgctatggttgcagccaagccaatggaatgtgttaccatacttagtgcagacaaaatggatacgccctcaaacatacttagatagtgtgggatcatgccaggtccaatatgacttacgtctgccaaaaagatgagatcgaactttgcctgttcaagttgtatggctttctgtacgtaatactcaatattttcactggcatctgctggaatagcggggtgtctccaacccgtgtgattccaacccacgccatcaataattcctcctaatttaagctttctttcttccatagttgaatgatctccttttcacgagttcacttattcccctgtgataaacctaattcttttgccaataattcatggcctttcttgcggctctcttgattcggataaaagtctgcaatcataatttcgtccactaaacttgctttcgcaagctgccaaaggtgctccgcaacttgttcgacacttccaatcacaaagcgatctttattacgttccctggccagctcttcatgaggcgtataggtgtgatttttggcttcttccggtgtagggaaagtaaggtttctcgtccccgtactcatctgtgcccacattaactcagctggtcctgcgatatatttagcctcttcttccgtttcggctgtaataacgattgtcgctaacatactttgaggttccgtaaaataagacgaaggcttaaaattcgcatgataagctctcaacacaggaatagccagttgcggtgccaaatgtgcagcaaatacaaaccctaatcctttttccaaggcaaaatgtaatccaccctcgctagatcctagcataaacagatctggaaccatggaatgatctcccggaggatggatggaactaaacgggtggttttctttgaagtcacgggcaaagaaagaaagcaggttatctaattgctctggaaaatcattcacttccattaattcttgagacctcaacaatgccaacatggttctgccatccgtgcctgaagctcgtccaatcccgaggtcaatccgccctggatataatccttcgaggagcgtaaagttttccatcactttcaaggcactgtgattcggcaacatgatgccacctgagcctactcgaatgcttttggtatgagctgccgcatgcaagctcagtaaatctggtgaggtactcatcaagtttttggtgttatggtgttctgtaaaccaatatctgttaaacccccactgttctgcgaattgaaccatttctgtcacgttcttaaggctttctgaagcctcagatcctgcatagatatgaacaaattccaaaatcgaaagttttagtccatttgctgtattcacatcggatacacctttctgagttatatttattatttagcttgctaactataggattaaaaaatataataattacttagcctactaactataaaaccaaatgagtttatatttttacactttagtcaaactaaaatggttttgttttgattcttgaaccaatcataagtgtattcgtttcgtttgcaaagaaggcaatttaaatgaacatagtacatctttttgtacctttggatcaggagtgatatgaatgagagtttgcaacgaaggatttgaacaagagtttatagatggaaaaagtgacatgtacgccatagcttttactcagaatgtcctctctgggcgttggaaatattttatcttatggtacctaaaagacgaaacacgtcgatatacggatatcaaaaaattccttggagatctgtctcaaggctccctcacaaagcagcttaaagaattggagaatgatggtgttattcaacgtgatgtttatccggaagttcctccgcgagttgagtattcgttaacagacaagggaatgaagttactaccgatccttgaaaagatggaggacttcggcaaagaatacggctaggcaacttaattgaaatggatagcttaacccaaaaaagccgcaaatttagcggctcttttactctgaaaaatttctattctactttataatcagtaactacatcaaattctccaataatattgtctccttctacatcatacaaatgaatcgttcgaacagtaccattcacttgtgtttgtgccaaggcttcttcgatggtagtgattttaggtgtaagatcttcagcttttagataaccttcgattccattggtgccaattgcagcaatcaaatcgggttcaaccccaatgattggttcagataatgctgagccataggtatcgccctgtgaattgacatcatatttagtttgaagcaataattcgtgaatcgtttccgatgtttcagtgttgttttcaaataaaacatttgatgaatttacgttcgataactttaagtttggcgatttgtatccagtataccgagtgtatccattcccattatagaattcaccaacgttctgagcataatacgtcgttttagtcgttattcttggagagtagacaaaaaaactagaggttttcgacgtattatatgtcatggaacttgaagctgttaagcttccgccagatgtgtacaatctagccatagctcccatatatccatttggaacacttgctgaagccttcactgatgcaacggcttcagcagtcgtacctgtagtgaaatttcgagtccatacttcagatgtgaaagtgtacgtgtgtcccttaattttgggtgtactatacggtgaagatgcagtattagccaggactgttgaagatgccaaaaataacgatagaatacaaatcattaccgtactaactttcttcgtttttctcttattcatagtttatcctcctcataataaaaaatatttggattatagtttcaatctttaatccctctctgtaaatatattaaatttattgtaataattagatttatttcccttttatcatagcactgttccagtttttttgaaatagattcgctagttttcttgccttaacatcaaagacatacttttgacaccttgctccggaattcacgaatcgctccttttcagctctgccattcgatgtgggtctcttccttatggctggatgtcttatgatatattatattaacaggcatcgagcacatccatgtttagtagcagttgtatcacctctcatattgactattgtagagtggatcgccaaagattacggaaaagtgtggtattttaatgggaggaacatcatctggtcttatgcttcgtattttaatccctatggtgatggcttatgtatacagtttgatcttcaacaaaatgttcaaaccaggtaacccttcataaagtatgtattctcagcaagcataggcaaatcaatagatcaatagggttccatattacttatctttgttaaagggtggatgatatgtttttcttctttttctttctgttacttggaatgattggtttattctttggagttagagcaatgagacgacccaattcatggccttttaatcgtacgaaggatgaacttcatgaatacgatatgatgggcatcaagtttagaggcgtttttctccttgcttttggtactgttctgactatcgcctctttcagacttcttcttatttaataaaatccaaaaaagccgctaatatagcggctctccattatcgatccatctattacattcaatatgcacactcctttataagtattactggctgaatgattactacattactcaataactactctctcatcttcatacgtaaaaaatattattcatagaaaaaacatattttttcttatgttaattgtatagacaaataaagttgctattatagcaactttattaaatgacatttttagatttcttaaacattttcaggctcataaattccgtaaccattcttgccattctttttaatcttgtacatggctccatccgcatgtctcagaagttcggaaggctcctgtccatgcttgggaaataggctgataccgatactcatcgaaaggttgatatagtttccggcaattttgaaatgggtactgaatgcagcttccaatcttttggcgatgacttcagcatcgtgatcatctttcagatggcttaaaatgatgaattcgtccccgccaagccgagctaccgtgtccgcacttggaattgtttcacttaatcgctttgccatttccagcaacacttgatcgccaacatggtgtccatatgtatcattcacttgtttaaacccatcagcatccacaaacatgacggctagtttgttatggtttcttttggcattactgatggcccaggcaagacggtcattataagcaagacgattaggcagaccggtaagtggatcatgcaaagacaaatgcttgctgattttctcggagattttgattttggcgtactccgtctccagttctttgatcagatttttaagtttatataccctggtattggtgttagtcatgtcagtaatctgaataagggcataactccgatcttcatgatagagcggttcaacatgcatattttgtctgaataattgttcatcttctccttcattaggaagaatgaatgccttatgtaacgcgcttgagcaaaatctgctctgtccatgatacagcgcattttgcaaaatatttaaatacatgttcgacttaaaccgtgggcagacctcaagcagattcaagcctactacctcttctacattcttgccagtaaagcgctccaaccaggcattccacacaacaatttttaaatgcctgtccacgatcattattcccatatgggctttgttcaaagcttgtgaaataagattatccattgtccgcctccaacaaagcgtccattttggccagcaggctcgatatggagttcatacttaatgctatgacaatgatccctgtcacatccgtatcggcaagtaaaaacgaggtatgtaaaaccaggacatagacttcattctgaagcaatatttgttgatcggaattggtgacatagatcagttcaatatcaggcaggacgtattccagtttgatctccagaaaattaccgaattctccaataatggcgttaagcaggacattgctaacttccttcaaaacgtccaaatccgtgtccatcaggttcggatcgttcggtataacgctctcacccagttctccaagacagatgtttgccaatactttagcctgctcaacaggaaacatcagaaatgcttttccctgaaattcgtatccaaactgtaaggatgacctaaacaggtgaccttcactaaaaaaaatgttgtatcttcgatctccaggatcaacatcggatatggagattagttccacttccggaatattcaaaacgatacgcttgtccacaatctctgacaacatgttagccgcttgtcccacgtaaacgttcactagttcagtaagcaaatccttctgtaaatcattcagcatgataggccgcctgaatcagttgaatcatggtagttgccttctctgcggttaacggtttattcaaaaaaccagaaatgcctaacatttcaacttcatccctagttgtcttctgaatatctgcagataagataataattttgacattgctatccgtttctcgaatcattcgaagcatttcttgtccgttcaaaccaggcatcagcaggtcggtggttataaaatcaggttgaaattccttgaataggttgtatccttgctctccattgttagcaatctgaatctcgcattctggaatatgatcaacaatcagctttgtaagcaatttctgtacgaaaatggagtcttccacgattaatactttcattttctcttcagtctccttgataaaatggtaagagctcgggatggtcaggcgctgtggacagttcttgatatagggctttcgcgcgcagtggcaccctgaaaagagactgactggtgaatcaagtaaatataaattatagtaactttaatttaattgtcaacaacattattgaataagttcgattcgtgtgcaattgacatactaaggtccgccgtttaaaaaacataaaaaaacggtcacctagtgaccgtttttgatcggttatctggaactgcattaagtttactcttttacccctccaagctgcaagccatgaacgaaatacttctgcaaaaatggatatacaactaagatgggtaatgcggcaacaatcgtaatcgctgcccgaatagatacaggtgtgaccatgttacgcgcagcaccaagatctgcaccattggcaacggctgcactgctgttggaattcatagaagatgataatagtttcatcaactcatattgcagcgtgctcaggttttgtttagaagatgcatacagaaacgtatcaaaccaagaattccattgaccgactgcaatgaacagtgcaacagtagcgagaaccggttggcacagcggtagaataatggaaatgaatgttctgaaatctccagcaccatcaattttggcggattcgatcaatccctcgggtagtgtctggatataggttcgaataacaatcatattaaaggcactgatcagcccaggaataatgtacaccaggaagttgtttaacaaatgcaaatctttcattaggaagtaagttggaataagacctgcactaaaatacatcgtaagaacaactgtaatggtaatgggctttcgtaatatataatcttttcggcttagtgtgtaagccagcatggaggttaagaatagacttaaaactgttcccaaaaccgttctcgccacagatataccaaaggcgctgaagatggtccctcctgcaaatactgctctgtagttttgatctgtccatacccgaggccacagataaatcccaccccggatggtgtcattaccggcattgaaagatacggcgagtgtattcacaaacggatacagggtaacaatcgcgattgcgatcatcagtataccatttaacgtatggaagacaatcggttcaagccgagatttattgattcccatctctagtcccccttatattaatcggtcttccccgagccgtttggaaattgaattcgccgcaaagatcagcgtgatactaactactgttttgaagatacctgccgcagtagccaaagaataattcccgatctgtagtccgtatttcaggacaaatatatctatcgtctgtgaccagtcgacaaccacaccattacctaacagatactgaacctcgaatccagcttccaaaatccagcccatattcatgatcagcaaaatgataacaatggatttgattccgggtaaggtcacatacagcattttcttatatcggttcgcaccatcaatctctgccgcttcatagagggaaggatcgatagacgtgatggccgccaaataaataatggcattccagccaacttctttccatacatgggatgcgcctacaatgccccagaagtattccggaacgctaagccacatgataggttcttgaatgatatgcagcttcatgagtaccacattcacaataccaccatctacagatagtgaacttgctacgatacctgtcacaataatccatgagagaaagtgaggtaaatacgatattgtttgaatggttcgtttatataacttatgtttgatctcattaagtaaaatggcaaatataattgctgtcgcaaatccgagcaccatattgatgacgctcatcgcaatggtattacgaagcacgttaagaaatgcatcgtctgttaacaaaaacttaaagtgtttgagcccgacccattcctgctgggtgaaactcttcgcaggactgtaattctgaaaggccataacccagccccaaatgggataatacgagaatacgagaatgtacgcaacgatgggcaatgacatgaacatgagttgtctttgtccgcgcaatcgttttaacagtggtgctttgggaacgactgtacgggtggtttgctctggtatggctccaggcgtgttcgccatctttcactcctcctattggcttgcagcgactttaagcatgatgtccccggaaggcactcgcctgagtaatcctttggttgataccttccgagagaatcattgccgcatttttttatttaacagaccagttctcgattctccatttcagttgatcattaattcgatcttcataggatttgacatcgatcttcttgtaagcgtctacatattcagtccaaatgttatcgaactcattcggttttgacatgattgctttaggcaagaatttcaatgaagtgtctgtcatttgtttgttcgctaccgcagcatcagagccttctttcagatcgacctgccatgctggatagtacactggattttctggtgcaggagagaagaagtcactccacgttttgaagccgtatgcatccagaagttctttatcttccggtttgaggttgtcatagaattcctcaggttggttgatcgctccaattgcattgccatcttcaaatgttccttcgagcttcggtgcagcagcgtagaaaccttcagctttgttaaccaatctccatgctggatcatcctgctctgtccgttgctctggtgtacgatagaatcttccctcttcattcacttgatagtctacaccctcttcaccccatgacaagagcttctggtacttctcgtccataagcttatcgagaaatttgatgagtgcgacagggtcttcggcatctttactgataccaaaaccattgttcaagttaatgaccggacgatccagataatgatctgtgatacttgtatcatagacaagcgggaagcctacgtatgtctggccaattttcccctgtgctacgagtgggtcttcgccggcttggaaattccagtgctggtcgaacatactaagcacacgtcctgaagaaattttggccagatattgatcgtagttctgaacaaaggcttctttatccagcaatccctcgttgtacagattgtttagttccttataataccgtttggagatatctttgtcggcaaaaacggttgcgactccactatcatctacgactacgcccccgtcattggggtgacctgtaagatgttcaggtgggttaagcaaagggaacgtccgccagtctgaagccaatgtagtgaaaccaatcgttggttgaccatcaatcgttggattcttggctgcataatcacggaccaactttgtgaaatcatccaacgttttaggagttgggtacccggcatccttcagtatggacttttggatccagaatgcaggaccagaataatagttactaatgaactctcctgtatacactccatagttaggtaaccagtaaatatgtccgtcactggaatctttcatccggttccagtctttaccgaaatgtttcttcagattaggtgcatgctcttcaatgagatcttcgagcggaataaccgcacccgctgagaccaacttggtgtctgctgtgatcagatccgggaaatcgcccccggcaatcataacgcccaacttctgttgaagatcacctactagaaactccatctcaagattaacgccgagttcatcctgaatcttcttgtagattcggttatctttagctggcgcctgatttggcgttccgataaaggccgagatgttcagtacctctttcccatcctttgtagtcgctttttcattgtcaccgctgcatcctgccagtgccaaactcaaagccagaacgagtgatacggaaccccaaagcttctttttcttaagtccccccatgtacttgccctccttggaagtggtatgtcttactgtttttagtatgaagaaatgtatgcggttacaaaatatatacatttaaggtctacccccctgtaattgtaggtcttattcaggaggggttcttctttttcatggatcaattcgcatacttttgcctgtattctactggtttcatggctgttcgtttttcgaagtgtctgagaaaatgctggtaactgcggtaccctacttgctccgcaatcgcactggatgtttgattcgtctgctggagcagacgcttcgcttcttccattcttaaatcatgtactacctcgattacacccttaccatactttcgcaaaaaggattgccctaaatggacaggattcacgtagaatcgttctgcgagctcctggatcgtaaatgtctccctgtaatgcatctgcacatattcagcaaccgtcgcctggatgccacccatttgcctctcccggaaaattgccagtgctgacttacattgcaaacagaaatgttccagattgttagcaacctcttctatatttcgatggcccttctccagaattccgctcgccaattcattcattagagcgttaggttctcctcctaattctctacacagggacagtccgcggaatataatatgggtagagaaaatatgtacaatctctggcgcaaccttcatctgtacaaacagttcaaaagcactccgaatcgcagacgagagttcctccacagaaccgttttcaagcaaatcgcaaatatggtccacctctgacagcgtttccggatcaaactgccaattctccagctgaatatcttcggcaaacaaaagacgctcttgattaaaaaacaaataacgcccaacttcctgagcggagcggaaggattcagataaatgctccagtttgttgaccgttaatccaaccgcgatatgaatatctccgcagccgttatgttgtatattattcatcaaacgctgggtaaaagctttaattgcttcaaacgtctcatttctattattcgtttcctccccccatacaagccccaatgagtctcttgttctgtctatcacataacagcaagttgtttcttcagccgtttgttcgactactgaacagacttcctgaatatctccctgaaaggctatccgcaggtatgcccaatgggacttgtttaaacgaggacgtatctctgacatctcctcctccgatatattttgcttatccttaatcagtgcggacaaaaacgctttgatcctttgctcgtttgcatgttcccttatacgctcctgggtttcacgctcctgcaattgcatacggagacggaccaacatttcctctgcttctgtactgtcaaccggtttggttagatagttggagacacctaatcgaatagcttgtctggcataattaaagtcactgtatccactcgtgatgacaaacagcacagactcatgttccaatcgtcgtgcttcttctacaagttccagcccattcatcacaggcatacgaatatctgtcaccacgagatcaggtcgatcttgttccatcatccgaatggcttcctcaccgttggcgcacacacctctgatttcaaaaccatacttttcccaattgatcagaagctgtaacccttcaatggcataaggttcatcatcgactaacagtactttatacatgagagttcacctcctatttcctctgttccagcttggagatcggtatacggtaccctgcaatagtttcctttccaggtacactgcttagatcaaatatcgcatttccttcataaaagagttccaacctgcggtagacattgcggagtcctacatgctcgccgttcctgggtctttcagaacgaatatctcgcaggagctcggttagtctccctgcatccataccgattccattatcgatcacctgaataaccagttcagaagcgtttcgtctcgccgttatcttgatctctcttccattttttcgcgcctgcaagccgtgtttacatgcattttcgacaagcggttgaatactcatgcggggaatgagcaacgaagctgcatcaggatcaacctcgaaggtgtaatcaaacagctctccaaagcgaaacttctcaatctggagataaagattcgtaaattgcagctcttcttgcaaaggaatcagattgtcagaatgactgagcaactgtctcatcagcttggacagacttttaataatctcaattacttccgtatatccattctttgtactaacgactagcaaggcattcaatgtgttaaataaaaaatggggattcatctgactctggagcatggacaattcagtcctcacttgatccagctccagatctttttggcggatttccagtttatatacgtcattaatcagcgtatgaattttaccaatcatgatgttaaatgtacgaataagcccgccaatttcgtcgcggccttcgtgaatttcaatcagatcgaatcgttcgttacgaaccttctccatatgtctggataacttgcgaatccgatagtggtaggaacgcaaaataatgtagatcaatacagaggggaccacgatacttaatgcgagcaaccccaaaattgatttaaaggcttcttgcagcaggtggtcaaggtgacgcgtatcggcaactccaatcaatttccaaccctttaggtaggctagattccccaacgatttttcgagcgtgtaagcagaatctccagattccttgagcattgattcattatcaaggggggataagtcggtttcgctgaattccccacttgaaacgacagttcgattgttactgtccaccagacgcagctgaagactgtctgattcacgatttaaaatgctatacacccggctaagttccagatcaatcttggaatacttgttgtaattggcataggaagtataggtatccattttgccaatcacactgattcttcttcccgcgttgaatccggatggctcaatataatcaacgacaagaatgcctccactggtggatttcagctgtttcaatccagggagtagattcttgtctttcatcacgatataatgactgcccgtctgaatggtatcgttatccgtatagatgcgcacctccagaatattcgctgacatgtaccgtgttaatttatctcgcaggaatgcatggtagacgttgtaataatccacgggggagtgataggtccgatccagtgcctcatagagcgaatcgtctgctgcaataattcggctcagggcaacgctctcatcaatcatgcctagcagttcccccgcagccctgtcgatggatttacgcagattttcctgttctctaatcttgatatccgcagaggttcgttcataaaagaagatattaatcgttattacaggaaggagaatactaagtacataaataagcagaaatttggatcggagaggaatatcattaaccttactgaacatccagaatttatgacgcatataatcacccttggtttttgtttttatagactgacggaagctccccagtatgcgctctgaacttttgggtgaaatattcagcatcatgatatcctagcctgaatgcaatgtcagtgatcttcatattggtgcgtcgcaggagtttacgggcctcctcaacacgaagctggtgcacatagtcactgaaactgacccccatctcccgcttgaactgttgacccaggtaggcagaattcacgtgaatacgattagctacatcttgtaatttaattttacttcgatagtgctgcttcaattcattcactgcttctgcaaccagccctcccgtacccgtcttttggttcaattcagactgggaaagttgcttggacagtcgaacacacaggtcttgcaatgtgccggaagaccaactcgcagcctcatgccattctttttcacatagtatttctctgcaaccctctctttttccatattttcgtagcagctccccgtggatatatcgaatgacatgatgtatccattccaatgaaacctctgctttctcacttttctctaacagtgcactcactgcaatatcgatggaatacgtgttttctgcttcaatcaacgccaagatctctttggagatattcatcatttgctctaaatcatattcttcgtttattcgatattcattaaaatgatcttcataggtttcatctgtaaccgtgactccattttgctgtttttgctcatttctgcgtttgtccagaggttcaatcatttccataaggatttgatgaatctcctcgggaacaagaggtttaagcacgtactgatcgacctgataccgtatggcttgcttcgcgtaattaaaatcggagtatcctgtaacgataacaattttagaggtataggcgagatcttctcgcaaggtgtgaatcaaaccaagaccatccataacaggcatttgaatatcagtgacgacaagatccggttcaaccgagttgaatagagcaagtgcttcctccccatccgttgccgttccgcagagttcatatccacaagctcgccagtcaatcatcgttctccatccttctagcataaacggctcatcgtccgcgacaatgaccttgtacattagctcacctcacttttatccttgatcagctgcatgtaatttatctatatcaataggtagattccagttgttctgaaaacgctaaacagcagaacaacagcaggattgttgtctgctcgcacaactttggagaacaaaatttctaccagtctcatcgtcattaatcaataacatagaaatggttccatcggaccgtactataagaacgctccgattgtagcgaagcgccgggttaacaattcaagtgtaacgcttacattttggtacaacaacctgttaaactataggttttcacccgacaaagtataggtttagctcagaagtaatctattgccaggaaaaagagttttcattctccacgcacaatacggaatccttgatcgggaccaaaaccatttgcatcaaatttgcctcgaaatgatatttcattgttattgacaccgccgatccagcctccgcctttcacaactcgccaagtttgatttggactctccgaatcgctgtaccagtcccagcaccattctctcacattcccagacatatcatagattcctaactcattcgccttctgagttccgacttttttggtttgattacgattgctctcaatagcgggccagctccagtcacccgtcagaatgttctcgccggcatttacccagtaccaagcaacttcatcaggattgttacttccgctgtacgtgtaatttaagctcttttgacctccgcttgcagcgtattcccattctgcctctgtgggtaaacggtaaccgttggcgtcctcgttgatcgttacattccattttatagtgtcattttcattgtgattattcgtgtcctggttgtctttatctatattgtaataaggtttcaggttttcttttatacttttttgattacagtattccactgcgtcataccagctgaccatttcaacaggcaggtcatctcccttgaagccagaagggttttcccccataacctccatccattctttttgagttacttcgtatttgccaatatagaaggaatccagcgtttcattcctatcgatctgactcagcttactgctcttgaaggctcctccttcgacgaataccaagtcatcgcttaatttcgtattacttgctgaacaagcacttagactaacaactatagcgattaaagttaaccataccagcttcttcattcaattattctcctttactagcttaaatccggcaacgtcgaggtccgttagtctggagaataacgttactcaacgctaccggaaaattgaatttcaaatgcaggtgcagaagttgaactgcatcacatcatttttaccaaaccgtcacgtttgcgcttccgctactttgataaccttccgttgccatcacctgataggaccagctgttgcctaagtacatccctttgctcgcccatgcattcacatgattactgaacgtgatggtagaattgactccgattggtttcttggtctgtctaacactccaatactgagggaaagtctgagtaccatcaatggaaggtgcattgtatctcatcgttgtatagatgtcatatgtgccgccatcactagtcatcgagcccttatacgttccggtaggacgatacgttccccagctatccaccacgtaatattcaattagagcgtttctagtccaaccatagaaggtgagatagccgttacctgaaggagagaatacgccggcattataattgaccactcgattaggcgtaccgtatgtccaccctttcccgacaacaaagttcccagtattttgccaattcacgctgtaattcccgcccgatccattcacggcgttgaccgttcctccgccatctgtccaattttgccaataatctgttgctgcgcttgatgttgctgcgaagacaccaaaactcatggaagctgcgagaacaacggtcattaatttttttccgaatttgaacatggatgatacctcctgatattttaatagatttggttgatgctacaatccgatatgaatgttcttcagcaaattcacttgaaaagacgttgcgaaaacagatacagatcgttcttccacacgggccaatcatgtcctccactttcctcatgccaaatgtgaggtactccgtgttgcgccaaatattggtgaaccccaagactaatctctataagattgtcctgttcaccgcaagagatccataacagcgagagcaatgaaggcgctttcgaaagatcagggacaagtagctccggacttctggtgtttggggctgcggagaaagcaccgatccatgcaaaatggtctagattacttaatccgatatttaaggattgacctccacccatggataaaccagcaatcgcccttttatcccggcttttatgcaaagggtagttcgactccatgtaaggtatcaaatcgttgagcagatcggattcgaaccgtttaaatgctttgattttctcaggttcaaacaggtctcctacggctcgatcattcgacattgcgcgaccgttggggaaaacaataaccatcggttcaagcatattatcgttgtacagattatcgagaataatttgcggagaaccatgagtatgccattcggtttcgtctccgccaataccatgcaaaagaaaaagtacaggatacatcgttgtcgaagaaaattctggtggggtgtacaccatcgctttacgggaattgccaaccgtggtggaaggatactctaccgtctccatgactccacgtggtatattctcccgatactggtcatatcccgttactgctggtgagatcaattccattctcttttcctccgaacatatgagtgactatcagtcttcagttaatccacatagccaaaacccagaatagtgaagcatttatgttcatggccttccgccatttcgatctcgatggagtgctcccccacatgctcttcgttaagcagaagtgtggcatggcaatgggtccagttcacttgacgcggatcgactttttggacgaataccccatctaccttgatatgtgcagttccgaattcatcgttaccagaatccttgaagattagaatgaggcgtttgcactgcaaacttatccgaaagctactctgatcctctttcccctctcctgtacgcatccagttgttggggaactgaggtgtgccatagtcatgagcatccatctcagccatctgcagatccgtgtccgttttacaaaaagagcctgcatcgatacgggcaatgtgattgccgtttttccgatccaacagcttcacattaacaaattcattcccaattagcggagctttttcaatatcatgatcttcctcatcccactcagaacgattcgtcacgtcgaacaaatattccaaacaatcggccataattcgatgccctatgttagttggatgatatatatcatggaaaaattgctttttggaaataacgttgccttcaccttttgtcttgttgaactgatctacgacagcatctttcacacttaccattggcagatcgtaatgccagcctaccggagcgagacgatcctgtagattccagtcattttcgaatacactgaataacaagatgaccgctggcttgttatcggcagtaagtgctttgagtaccagactctcgtaacatttaccttgggtttcatcatctgcgtcattgactgcgaattcgattatgacaatatccggctgaacggcacctcccctcagcacatcacgatcataacgtacaatccccagttctgaaggagtcccacccacacctgctttaatcagatgaatcggactatcttttgaaagcgcaaacataaacttgaacgactcatacgaccgataagcgtaactttggagatgaataggtactgcaccagcaccatgggtaatggagcctccaatataagcgataacgacaggttcgccgttttttgccttctcaatggctcgttttaatctgacattatttcctttgttcagaagagatcggccaatcatgtcgcgatatctaggtgacccaaaatcaattgcgggcttgactgccgacgctgtcactccaactggatcgcacggtgcagtgaattccgtgttttcacctgcatctcctgaatcctggagcataaatcatcatcacatccttccggtttagattctgaccatcctcaaacaacttttaaagaatcacagcttgtattattagatcagatgtgatccttctcccaaagtgtatcccttacataattttacaacaacctgacaaagtataggattttaaccaatatatcattttaatttgagtacaatgacatgcagatatgaacacctataatttttcatgtaaacgctttaatttgtatactatttccatgttataattttgaaaaaccgcattgatgaaggaggatactcatgaatatcacgggtcaaggcgcgtgggatacgggtacatatacaaatctgttcttgaagctaggctacgatgagaatgagatcacgaacagattggaagaaacatggaacgagctgttttacggcgatgataatactcgaatatattaccccatgggtgaggataagggttatttgctggacactggtaatctcgatgttcgctccgagggcatgtcctatggcatgatgatggctgttcagatggacaaaaaagaggaatttgatcgactctggaatttctcacactcgtttatgcaacataaagcgggtcgttataaagattattttgcctggcattgcaagcctgacggaacccaactctcgcaaggtcctgctcctgatggtgaggagttttttgccatggcgcttttttttgcctccaaccgctggggcgatggcgctgaaccttatgattacaaggcacaagcccgcaagattcttcgtgcatgtatacatcaaggcgaagacggcgaaggcgatcccatgtgggacccggaaacaaaactgatcaaattcataccagaaacaccgtttagcgacccatcctaccatctgcctcatttttatgaactattcgcgaaatatgcggatgaagaagatcagcgcttctggaaagaagcggcggccgctagtcgcgcttaccttcatacagcctgccatcccgtaacgggactatcacctgaatatgcgaactatgacggctctccggccccaatacagccgcatggtgatttcagacatttttacagtgatgcctaccgtgttgctgcgaatatagcgctggactgggaatggttccgcaaggatcactggcagatcgaacaatccaatctgattcaatccttcttcagtgatattgaaatgtccgattatcgtcgttatacaatagaaggtgaacctttcgacgaaccttcactgcatcctgtaggtttgttggctaccaatgccatggcttcactggctgcggacggtccacatgctgacacattcgttcgcaagttctggaacacacctctgcgtcaaggagagcgacgttattacgacaattgcctgtattttttcagcatgctcgctctatgcggaagatatcgcatgtactaaactaagggaatgtgcacgagccgttgaacctgccctgtgaacgtttggcttgcaggacaggtccaatcactgaattttaagaaaaatgtaacgatattacgatttaatctatatcaataaaaaacgttcccggctcgcatatgttgactgcgaaccgggaacgtttggttgtacaaatacaggcagtaacttttcccgctctgtatgattcagatactttatttatttggaaacggaagaagtatcataggaagactgcataatctccagatatcgattaatgttcagtccctccaggcctttcacatattcatcccaatccttatccagacttttggcgcctgtaataaattgcagggcgttctgatcgatgtaatccttgagattggtctgcatcatgctggcttcatcagcttgggacggatctacccacaatgcccaatgagggaaaatctctttcggttccttgccctccattaacaatgtcgcctcatagagacgtcgctcaccaccatcattggcatagatgtctgtcccctgtacttcggagtcccgatatgcctgataatgattgtactgacttaatgcagcccaactgtcattacgaggttcttctccagaaggaagcggaatggctttatataacggctcaatctgatcattgagcgccacttctccttcttgaggtttgcgccaacttacgccctcttctcccagatatgatgccatggttccttcctgggtatagagataatccagcagttttatggccgcgatctgtgtttcctcactggctttgtttgtcagtacaaaagacgctccgggatcaatcggatagttgtacgtagcataagcagcatggggtcccttcaatggagggatgggattataatcattcccgtaaggagaaccttcggcagtggttacgaataatgatggatgcatcgctgctcccgcaccgagaagctgtgcatcagcgttatctccaatttttttgaaggccccgacgttttgggtaaatgcccctggatcaatcagcccttcatcgtacagggatttaatataggcaagcccttctttccactccggtttgttcactacggtctctactttcccctgattgacaatgagataattccgatcgtcgtcatagataaaaccgttcatcaagtacggaataatgtgcactccgaaattttcagtcgaaccgcttagcggtacttcgtcggctttgccgttcccgttcgggtctttcgttttaaatgcccgaagcatttccttaaattcttctgtcgtcgtgggttcggtcaggcccagttgttccatccatttggtgttgacccacatcttgtttgggtatgaacagtgaaaacattcattcagacccgtcagaccatagatatttccgtcaggagcagtgttcatggcccgataatagtcattgctttcaagcacttttttaatattgggagcatgctcctcaatcagatcattcagcggcaaaataaccccctgctgaccaaacttcaacaagtctgtctgggagaaacgatctacccaagggatgagcagatacaagtccggataatcaccggaagccagtgaaatctgtcttttctccgctgcaccgtcgaatggaaccgtagtccagttgaactgaatatcaaacttctcttccattttcttcgtgaatttgttagtggacaggttggtatccgaaccctggtgagcaaacacattaatggccgtcttgcctgacggatcgctgccttccccgttccccttatcagagcttgaacatccggcaagtaccaacgaggtaaacagcatacaggcaagaatgatgaatcccgcttttttcaatataatcctctccttcatgaataatagaaaaaatgaacttatcctttaactgagccaatcagcatcccttgcacgaaataccgttgaacaaaaggatagatgattagcaccggcaagctggccatcacaattaacgagtacttcatgagttcagccatctgctgctgtttgatcatttccgatgcatccatgctccccgtactgctgttcagaataagaatgctgcgtaatatcagctgtagcggatagagcgactgtgatttcagatagatgagggcgtcaaagtatgcattccactgaccgacagcgtacataagtgacaacacggcgataatcggtttggcgagtggcaggataatactgaagataaaccggatgtcactgcagccatcgatgtctgctgcttcggacaattcttccggtatcgaattctgaaaaaaggtacgggcaatgatgacttgccatacccagacggcattgggaatcagcaacgcccagcgggtatcaatcagtcccatggttttgaccaccagataggtagggatcaaaccgcctgagaacaacatggtgaaggtaataaacatcattaacgagctgcgaccaacaaacgtttttttggataatggataagcaatcataatggtcagtgccacgctgatgaaggtgccgcaggctgtataaaaaagggaattggcatacccggtaaggacttgatcattccgcaatacagacttgtaaccgtcaaacgtcaggtcaatgggccacaaccagacttttcccgaggaaacggcagcggggctgctgagcgaagaactcacaatatatatcaagggatacagcacggcaatcagcaccactgtcaacatgaagtaaacaaccgttataaatacgcggtctccccaggattcacgaatcgtgctgctgctcttgatccgcgaacgacctgcatttgtctgtgtgttaggcatgggttgattctcctcctttcgctcccgttaccataagcttgtattggacagtcgcttggcgaccgcgtttacgattaatagcagaatcaggttaatcaccgagttgaacaggccaaccgcagtagcgaagctataattggcattcagcaatcctattttatagacatacgtggagatgatctccgaagcagacaggttgagcggattttgcagcaaatatattttttcgaacccaacagccatgatattccctacactcaggatcagaatgatgacggctgccggaagtagtccaggcagatcaacattaatgattttctgtattcggttggctccgtccactttggcggcttcatacagggatggatcaacacctgccagagcagccagatatatcacagcggagtaccccattccctgccacacatcggaaaatacgtagatggatcgaaatagtccgggctcaccgagaaaattcaccgcttcgaaaccaagggcacctgcaatcgtgttgacaatacccagcctaggagacagaaagagcataatgatggagaccataacaacagtagagatgaaatatggagcatatgtcaccatttgtactgtttttttgaatcgtatgtttttgatttcgttcagcgcgagcgccagtaatataggaatcgggaaaccaacgatcaggctgtaaaacgaaatgtagagtgtgttcttgatcagcatgacaaacgccggatttttaaaaagtaattcgaaatacttggttccggcccatggactgccccagatccccttgatgacgttgtaatctttaaatgccaggaccgcattcaccataggtacatacttgaaaataataaagtaagcaatcggtggcaggatcagcagatatagctgccaatgtcgcctccagcttctggataatgcttgcttcaaggcaaacggtttacttggtttctccacggactttgattcactggtcattgtggttctcagaatcatccccccattcttggctccaaatcgtgctgaacttcagctcaacttggtagcgcttactttttgagtaatcataagattgcgctggggatgcgtaaaggtacagttacgctgagaaagtacaaatagcgaatatagttcccgagaaacagcctacattaaccgctatgaacgtccattttccgaaatacactcggagaaatgccgcgtacccgcttgaaagctcggcggaatgaatgtgcactgttatacccggtggcctccgcaatctcgtcaatggtctgaccagtggagtgcaacaagttcgaggcagcatcaatgcgtacccgttctacataatcggaaagattctctcccgtatgttctttgaacagttgggatataaacttctcggacttgctcatgtgctcggcaatccgatagatcgtcaagtttgcatccccataatgttgttggataaaacaaatcatttcgcttacagtatccgcatgtgctcctgctcttcttctctggaaatcaccgcagatgtcttccgttaaccgtttgaactttgcacgcagcgaagtaatcgtttctgtcatctgaatggatgtcacccgggttttatattcctccagcagggaggcatccaacttgaattttggttcgtccagcttcagaaaagtccccttcagctccatgatgaactgctgtgtcatctcgtaggacagttcccgctcctctaaattacgaaaaaacaattgctccagaatacgtaccgcctcttcaggctccccgactttgattgtgttcagcaggcgctgttcagactcaatcggataatagaacatttcattttccttcatcgtatcttcaaatctcaccagatgatctgttcctatatgaatggcataatccagagcttgtttggcttcgtcaaaggaacgccctgcatcattccagacctcgtaagctgcacctgtgccaattgttgtggatatccgatgctcccggtagatcacttccatcaaggtgttcagctctttttcacatctccctatagcttcattaagtgagttctcatccaatggacaggcaaaagcgatctggtctgttccccaatccgtgatcagcagctgcgcattccattctgtaagtacctgtttgatgagcagccttgcgacacccagttcatggatcgtttcttcactgtccggattggcatatccgtttaccttcactaagcctgccaagcccttgctgctatgaagagaaatgtgcgcctgggatgagataacctccaactcaagtgaggtatagacttctcccgttaacaaacgtttgataaaaccgtctctcaataacggaatctgctcattcatggcgtttttaagtgagtcattattggcaatgagattgttaatatggcttgccaaaaaatcatattcattgccccgtcttcctggggaatcggtgatttgttcccgaaaagaggccaacaatctgtatacgggtgcactattccgataggccagaaccagcccgaataacagtcccaaggcaatggttgccaaagtaaagaccagcgtgacttgtttgatttggtccgcttttgtcatgagtgctttctccggaatccctgccatgtaattccatccattttgactggactgcatcgatatcagcagccgaccatcacttccaggctgtacattctgcacgttcagctccgtttccgcagcgttatcttctctctggcgactctgtgccatttgctcggcttcggcttgttcaatgccatgggagaaaatgatctgtccttccgcatcagtgacgagagtccagccgccatattgatccacaatattttgagtaaggctggccatctgatcctgatcaatcatgacaccaatcgtcgcttgcggtttgttgaagctgttcaaaggcagagattgcagaaacgtaatggcgggaacgtctgcaagcacagtgccgagtatttcacgtttatagtttcgaagcggtatgatttcattaaagtgtggttgtttgagaatttggttatgccattgttcaaacgacataccgtccagctgattggcagcataataatgctctggacgataatacacagttcttggtgtgatgatggcattgtagttcggaatgtgaatgaagaaatgggacaagtaatcattggtactgctgtacatggagaggctccgctgcatacggttcataccgtagacattgtagagatcatgcggctttggcccagcaattaaattttgcaaatcgggattgacggcaagctgcctggtaaaggcttcaacttgaagaaggttacgctcaatgatctctttcccgagactcagcgacttcaagctgttttcaatggaactggaacgggccgcttcaatagaagctcggtaagaggcatatcccgcaatttgaggaatcatcagaatgacaagatacgaaatgaggaatcggcggaacacgggtgaaaatttggaccataggagctgcatatgtaccctccctttttttatcgagcgcttacatttctctgtgttaaggtagctgttcaatgatacaccgggcatttcttcctggtgaaggtacaacttcttccttatggtacatttacatactgtagcgtacaatgcttgcatgaaaatatttgttggtctgcgggttagtgcacaaatatagttgtattttaccttcgcatgacatccatcacaaagtatcaaaaataaacgcaaaaaacctctccaagacatggaatgacttggggaggtttttgtttaacgttgtgctattagttgctaacggcaacaaatttccattgttggtttgtagcacccgtgtaggtgttctgctgcagcttggctccatccgaagtggaagcgtttgccacttcaatcgctttattgctgttcacgttaatgatactccagtacccgttaccaagatcgttgactttaaaatgctgagcggttgtgttcagattgctcatgagttgaaccgcttccccattggtgagggtaccgttgcgaatgtcgatgactttgtccggcgagttcacacttgtcagtgtatagttgccgttaccgatcgaagtcagaacccacttctgagggttaccgcccagatcgctccactgctggagctgaagattattttcattttgaccaccaggaacatcaacaactttgttggaatgccgggctacgattttataagttgcaccggatacaagacccgttgtcggtccgccaccttgtccactgcccgggtaagtctgagcacgttcatggtaccagttgaacaggaatcgtcccatggcactccgtgaagcatctccatcccatttcagtccagccgttgggtcggcaaaggagcttcgtggtccttcacttagaatgaatccgttcatatgagctgcaatgctgacattgcctgatgcgttgaaaatcgttttggtattggtaccaaaaccttcattgctgccattaaacaagttccagtaggccgaatcgccaggtttgtttttgaaccaggttacctcggtaatgttaatcggatatttgtcagcagctgccttcacgttggtattccactggtcttgcaggatagagaagttgtcatatgcgccataaccagggtaccagtgaaccgcatatccatagttattgagcggatcagtcaatggatggcttgccgtcaagctgtaaaattggttgtatcccagacctgccgcccagatgacgttgtccgcacctttgctgcgaattgttgaaatcatggaattttggaaattacgcaagtcattccagtgatccacaaagtcattttccccgttgtatccaccccaatgtccattggcataggatttcaccggttcgttgatcagttcgaagtgaacgttgtctgcacttttgatctccgggcgtgaagcgagataaccccagatttcgttgaatttttgcaggttggcaggtgttgttgcctgatcatccttcaatgtgaagtccagtcccaggacaacatagacaccttttgttttggcatattgaatgtacggaataattacattttgcgtaacggtctgcacaccggcaaagttatatgtaccagcagccacatctcccatatcctgacgatcgatgaacagacgtacctgattcatattccagccatgattgcttccgtacttcgcgctggtgtcagcaaaagtatcggtaatgtctttcagataagccagtgtagctgcatgacggttattgccgtgcagattgaggtaataattgctgtcctgatacgtccagtaggcacctgagggttgatgccaaccgttcagtaggacaggctggttgttgctgttcaccaggtttttgccgtttacgtgcagcttgcccatcggcatgcccacccatgcttcggcacggctgcctccccatggagcaattgtgatcaataaagccagaatgagtacaagtttacaagatgtcatgaacttcttcactttaattcctcctgatctgatatattgccttgcaatcgcgagtatgctccgtcagagtatctctgatcaaacagatcgctcaggtcggcgcccgctcccgcagcccgttccacaccagtagggggatcctgcgcagggaaggatcgcggttctgctgtaggcagacgttcatgagatcgttacatgcccccttttcacagatagaatgttgcatgaagttcctcctccctcttccagtctgatcccactccaaacgtacagaagaacttaacttaaccgacgattcccgtacgctctacactctctacgaaatatcgttgcacaaacaaatagatgacgatcaaaggcagaatggcaagaagaattcctgtatcctggatcatgctcagatagaacggatcggcctgggaagctgcaccgtcggtaacctgctgggccagattatacggaagggacgataactgggtcgacatgactttacttgaagtcagataagtcgtcgtatagaagctgtcgttccactgccatacgaaggaaaacagcatgactgttaccatggacggaatggcattgggcagcatgattcttgaaaatgttcgtccgatgcccgcgccgtctacataggccgcctcctccacttccttcggaatacctctgaagaattgccggaagataaagatgtacaaaccggctttaagtgaattggccgtaatcgccgtcagaataaacggccaataggtattaagcaaattaacaggtttgccggctataagcgtcatgagccccataagatcaaagcttttcagattcagatataccggaatgagaatggtcgttggcggtacaagaatcgtcagaattacaccagcaaacagccagttgcttcccctgaatttcagtctggcgaatccgtatcctgcaagtgcacaggatgctgtagtcagcagtgtagtcgttgcagaaagggcaaacgtattaaacagcgttgcccagtaatccattacgcgtatcgcctctttgaaattgtcgatggagaagttctgtggaatccacaccaccactgccgaatacagatcacctttagctttgatggatgtggaaaccttctgaaatatgggaaacaggataacgaaggaaagcccggtaatcagaacgaatcggatcatggcccacagccagcctttccaatgctccagcgataataatcgtgatgttgtcacgtgggacaccctcctttctaatcttgatagaagactcgcttcgagaaaatgatgtttacgataaccagaatgatggcaatggccagaaagtagacccatgccatggcagaacttaatccaaagtcaaatttgacgaagccggtatcccggatcagttccgtcatggcgttattggcaaacgaatcaatgattgtatagatcgcattgacaaaaataagcgggctgaccattgggaacgtaattttccaaaaggcttcataacccgttgccccttccatcttcgaagcctcatacagttgaggggaaatcgtctggatccctgccaaaaagatcaaaatctgtacaccggattgactgacgatctgatagatccgatctacggcgctactcagatacgtgacgatccaatcgctcactccggcgttaaccatcagattttcgagttcaaatgtcccgagtgagcttccacctgtgctgctctgattaaccgcttcaatcaggctggtgctctccagtgtcataatcactcccgatgccagaataacgggcaggaaaaagatcgaccgcgctacagcccggcccctgaacttctgattcaggatgacggcaaggaacagactgaatataacgataagcggtacgttgatgagcacgtctgtgatcgcctcaattaacgcacggttaaagcttgtattgacggtcagcgcctgaatataattggcaacaccgttgaactgaattgctatgccttccgcgttagcctgaattgtactcatgctgtatcgcagagaggctaacagcggaatgaagaaaaacaacacaaaaccaatgagccagggaagcacgtagattacgccccacatggctttctgctgagcatacgtacgacttccccatttccatttcaggagcgtcttcagagctgctcaccaccagtcacatagctttgggcttccactgtatcgttgtcaacttctacagggaagtcgttataattgacaattacgaacccgccaccttcatatgttgtccggaagacgccctcctccagggattcatgggacatcatggaacgtccggcaaacggctggttcacctggttcacctcgttgtagatctcggcagccagatcgatccattgttcataattcgccgcgtagagatcatcataatccgtttctttcacaacatggtttggcgcattgaaccatgcaaagtaaggactggctccatattcaatcagcttcagcacatattgccttgcattggtatatgtggagagattgtatggcgtccccgtataaccgatgctgccgtgtacaacgagctgatagaacggaatctcttcatcctccagcttgaaacgactgctggtcatcggcgcatctgtcagaccagttacatacggcagggcataagcgttcccgccttcagcaacaagcgagccagcctgctgcccgatttgttcaagtgccttctttacggagccaagcgcttgtgttcggtccaccagctttttcggattcatatcgctgtttaactgagctgccagatcattcaggcttagtgagagtccatccttttgaagggacctcagctcatctaacatgtctgctgtcacgtcctccagcatgttgggcgaaagcacataggatggtgaacgatcccggtcccgccgctggatggcctggttcatcggatacaagaccgccggttcctgagttaatgtgcgtgaagcttccttggacggtttaaacccttttttggattgcacattcagcagagcgatatcgggatagaagccgatgcccgcttcttgtgtgtatgtgctgaaatcccgcaatccctttttcccgcctaccgcgccatctacttggatggaatccggcagtcgatgatgaagtccgccgttaagccatcccgcatagcgcacctgaatattggatacattcttctccgtcaaggcggaaagaatgtttttggcttcatcaaacgtggtcaaagcctccgttgaatcatacggtatgcccagcatatgctgccttgttgtcatgccaccgaacaattgcagataaaagggaacgttactctgctccttgctggcattcagctcgggaagtccgccgtttttcaccagataatcccgatagagtgatgcaagtcccgagtacgaggctttatccgccccgacaaaagcatatcgaacgacgaaatcagacgcggtcggtttcttctggaatttgggaagtgtacgaaccatatcacttgcctgaagcgtcacatcgctcttgttcactacatagaagcttggatatacgttgttgtaactgttcagtttgccgctgatatcggcattcacaactgcaacggcatccccttgttcaataattcccaggaaagctccctctttccgaatcagtccaaataccggcaacctggctctggcttcattcgaacttgcttcccgtagtttcatggtcatatccggtccgtatatatcttgttggtaggcaggatactgcagcttgccattgttaaaatggatcagcgctcccgaaccgtccggcaccagtatggagccctcttcttctgaacccccggccccgaaataatccattacagatatgctgttgatcggatattcctccggaaaatgaatgcctgaggacggaacacgtacaagcagatcctctccatccagctcatattccatcgtaagcataaacagccgtggtccacttcgttcctcttcaatgccaaactcggcatgatcctgagccagatcctccgatgtgtaaccggctgtgtcaaaagccttcaaggcccgggacaattgcaatccttgcatcgccttatcaatccggacgtaagcgccttcatccttgtcttccgcatagccgaccttcaaggcccgttgcccggccttgtctagctgtgcaagcagcctttgttcgaatcgctccttgctgatcttcatcggcaagtcttctatggatcgctcagtgcttccaaactggtagtggacccgcacgccgcttggcagcacctcgtagcttatctgcttgtgtgcaacactatccgtgaaggaattcacggtgctgctctgtccgaggctgttgaagaagctgagcttcgtttgtgatgacaaaaggtctttgtttatcccggcagcaaccccatcctgctcacgatctgcaggattgctgcgccagatctgcccgctctgcgtgtgaatcactgcaatctcggcagtctcttcgttaatgaacaactgcagcgcagcattctgcgcaatacctaccatgccgggaaggcggacatcgctgaacgatgatttcagtttctctccgggaggcagggagggaaagtccgtctgatcagcggcagtcactgtctcgtgagcgagcggtgttggcgagaattgacaaccgccaagaagcagactgcccgcgagcagcattcctgttatttttttggctacggtataattcataacaaattcctcctcccttagccccgaagcactaattcctgatagatggttacgacaaacgatacaatctgctgtacaagactaaagaataacaggcacagaaatgccataaacgccatcgctacaagtgtcagcagcatcgtgagcaccgttttggctggtgtgtactgatgaaccgtcatattccccacaaataacagatataccgtccatacaacggcgagtgcattggagaaataataaaaggcagtttcctgcgcagagatcacaagactcagccagatccatggaaaatgaatgagtaacaacggtaccagtgcaaaacacgttgacatgaaaatttcggagaacttgccttccccgtccatcaatgtggttaacgaccagttcgccacacaccaaaacagtaccggtataatgacatataacatttcgagcagactgttcaggtactttggattactgagattaatgagaaaaccgctgtactgggcatgcaaaattttggtgatgaccagaagcaccaggatcatgaaagcaatcagcagtgagtttctctggttccgttcatacttcaattcccagtatccgtcaaacggatgaaaaatcagatgcagcgggtactggtatagttgcttacttgatgcctgcattcgtagtcctccttttctgcctgcgaacgatgatgacggtgacaatcgcagcgacagccaggaatataccggacatcatccatgaaaaatgctcacgcatcagctctttgcggtacaaaagaaaagctttggaatatcctttgggctccatgctgcgcttgaaatatttcgcagactcggcgtattccttctgacgaagcaatgctttgccaattcccgcatacgcatattccaagttagcgttcatctcggcagcttgggcaaacagcaccgaagattgatcttcatcaccgttatagtagctgcgcaccgcttcgtggagtgtacgtccgtattcagttgtttgaaagacggtgatttcacccagcgctttatccagaactaacatccggtctcccgcgcgttccagggcaacaggtgtattaaattggcccagccggttcccgatgccgccataaatatggagcaggtatccgtctccattgtaggtgaagattcggcccttgctggaatccagtacggaatacatgtcactgtcacccacatccacatcaatcaggcgggatggccctgcttcctgggtatacagcaaatcaccctgcggagtctgatagccttctctgcgcaaaatgtctgtaccctgggcattcagcttcttgaccggatctttgccgcgatccccgctagtggcgtagatgaagccctcttcatccatatccagattggtaaattccgttggagtgaacatcaccatctggctccgttgctcccgtgttgcaaaccgtttccacagatattccaccgggtccacctgaactctgttcgctccaatgaaggaagagaacgtaccatcggcgctgaactccatgaatccatcaaatacgccttcagccatgacgtagatacgctcccctttgtccataacaatccgcatcggtttaaactggaagtctgcttttaacagatccgattttggttcagacacgatcttgaccagcttcccctgttcatccagatgcaccacccggtgattatccgaatcagcgaccagcagatggcctttttccgtgacgtacaatccctgtggatttttaaaatgatcttccttgccttcctgctcaaatgaatcaatcgtccgtaccagcttgaagttgcgatccatctcaatgatgcggccattgcccgaatcgagcacaaagacgtgctgattggcggtaacatgcatgtcacttggctctttcataggagttgtgttcaacttcttgccggtgataatggttgttgcctcatatgccgcgggtgaaggaactgcgtcaccccagaaggaataatgatacgcatccgttttaccgtctgcactcacatagggcgcctcttgaacgaacaacaggaggcagatcatgcccatgatgatcgatttacgttttttccatgtgcttctccgcacctcgctgcctcctttctattctttcatgcccgaagtggccatcgtctgcataacactgctctgagagatgataaacagagtgatcggtacaatcatcagcagcaaggcaacagccgcacctacaccggctcttgcaatccctccctgcacaatctgactgagcgcataatgcagcgttttgagattttcactgtagatgaaactcccgccatccgttccccataacgctggaaactgcaggatcatgagcgtgagccatgccggcttcacattgggcatcacgatgctccagaatatccggtattcattggctccatcgattttggctgcctccagcaaagcatcgggaatctgctccatgaactgtttcatcaggaaaagtcccaacgagaacgcaagtgatggcacaattatggaggcatgagtgttaatccagccaagccaggacatgaccatgtagttcggaatcgccgtaacatgcggcgagaacatcagggacagaatgacaatggtgaacaatactttggaacccggaaaacgatacttcgccagcggataagctgctgcagatgcaagaaggatatgccccgctgtgccaagtatcgtaatgagcaatgtgttggcaatatagcgggataacggcacccacgaattacccatgagattgatcagatcggcaaaattctccgttgtcggattgttcacccagaagcgcggcgggaaaataaacagctcatccagcggcttgaatgcattgttgacagcatagatgagcggaagcaccataaaggagccgaacacgcccagcaatgcaaataacatcaggctgacggtaaatgaccgattaagcctttttggcatgccaaacacggcacgtactttgctggtcatcgtcattcacctatctttctaagcattttttgcgtgaaaacgtttgtacccagcatcagggcaaacagaaccgttgcgatggccgaggcatagcccatctcgaaacgaatggttccgaagtccatcagatgtgtgacaactgtgtgtgccgcatagtttacgctcgggaaacctgccagtgcgatggagatctcagctacggcgaaggaagcggtaatctgcattaccgcaccaaacatcagctgcggtctcatcgaaggcaaggtgatgtaccagagctcctgccagcggtttttgatcccgtctacggttcctgcttcaaccagagaacgatcaatggtttgcagtcctgcaataaaggccaggaagctggttcccaggctcagccacagctgtacaataatgacgattgccagtacatacttctcgtctgcgagccattggatcggttccagtacaacgccaaggcgcatcaggaagccgttcatatacccgtagctgtcacccgagaagatgatcagccagatgaaaaagacgttgcccgatatggatggggcatagaaaaccagcgtcatgaccgcccgaattttaggagacagctcattgatgatccacgcaaacaaaaagcaggctatataactgagagggcctgtaattacggcaaaaagcagcgtgtttttgagcgcgatcagaaatacgtcatcgttcaggaaaagccgggaatagttctgccagccaacaaatcgcggcagctccagcatattgaagtgaaaaaagctgagcccaagtgaaatgccgaccggaatgacagtaaacatgaaaaaaatcagcataaacggtgccatcaatacataataatgcctgctgagatacagatcccgcttcaatagggaccaccagccgacctggcgggtatggacggcaggagcggcggctgtcttggtagttttagcttgcaaccgttaccctccctttcctctatttcagattaaattccttgcgtttcaactcaatttcatcatcaatgtacaatacatagtctgataaggcttcacgcggattttcatttgcattgaccaccttacggaaggcgttgtccagatgtcgtcccgtgaaataacctccaggaagctgcgggattccctgtacccattcccattgtttctcgagattttgataatccttcacaggccaaggcaattgcttcaaggcttcgatattggccgttgggtaacgggcagccgctcccataagaccttccatttctctcccgtattcaatctgggtctgatcatcagtccaccacttcatgaacttccacgccgcttccttgttgtccgcattttcgagcatcatcaccgcactcgtagcgctggccacttcatgccgtatggatccatccggaagctgtgtacccggaacaatcgtaaagtcccagagattgcggatttccggagccataactgtcagcatgttatacgtggtgtaatcagcaattccgatcggcatttcccctgtacggaagcggttcggaaaatcggctttgagcggaaacttgtaattggtataaaattgcgtccaacgtttgaacgcgtccattgaaatctccgaatccagtgcacttttcttctggtcttcggtgtagaacgttccgtcattctgatataacaacatcgcaaaggttgaattcggaaccaggttggcattgttcagcgtatcctctataggcagataaaactccatgttatgcttctgcagcacggcgatggcgttatatacgtcttgccacgtttttggcggctcgaggcccagttcattcagaatatctttgcggtaaaagagcattggaaaatgctgctgctccggaagggcatataccccgtcgttgtagcggtaaggcgtcaatccgctttcacggaacctgcccgaaatttcctcgaaatcggggaactggctcagatccgctgttgcattcctcatcgcatagttcaccggaatgtcttcgcccatctgcatggcaacatccggtccttctcccgagagtgttgcgggcagcaaaatattaggcggaacgagacgtaactgcacggacacatccgtatccggggtaaacgaatcgtcgatcatgcctttcagtacttgggcctgatctcgtccggtcgtgatccatacggtgatggcatccttcttttgttccacgttgccaatgctgtcgtaatcttcggtatacgacgcaacatatgcacccagttcgtgcttcacctgctggacggtgctcgcttccgcttttggcaacgattcacccggcggagatacgacaaggtaatccaatgtaatcggctgttcacgtaccgatagaatccatgtgccgagaccacctacgttaattttgaacgtatccagccgtttgggaaccgtctctggtctggccgccatatcttcaagctgcaataccatggcgtgcagtacggccactttgtcactttgctcacccgtggccttttccaggtaatctgcaacggaacgcaaggtgtcagcttgtcgttcaaacacctccgtcatctctggaatacgccgttccagctggtaatcccgcagtgggtctggactgttggaggtgatcattaatattttgcgatacatctcattcagttccagcacgctggattccacggtccgaagcagcggagcgatgtcgccaagtgtaactgtcattcggattcggtgtttccctttttcaagatgaaactgatatggcttatcctctcccgaacccaagacctgagtttgccaggccgggctgtagttaaatcgaatgcgtttcaattccttaaacggaacttcgccgttaatcgtcagactgcgggtggcatatatgccacgcaattgatcctgtttcaccttaagcgccagttgatacagtccgtcttcaggcacgtcaatttcccattcaatccattcgcccggcagtttccagttaatgcccccgatggcgttcatccgaattttcgatacattataaggctcgagtgaaggacttgatcggtccgagattggtgccagtgtaggagatgatttgctaacagcttcctccccctgaactttcagcatgacaggagccgattgtttcaagccgagtgaggcataggtttgctccagctctgcataggaaggaacttcgctttcttgatatagctcaatataatcgatcgccatgctttctcttaatgaagtaagcgataacttctgactgcctttttcaaaataaaactgaaacggttcctcgaagtaccctgcgctgtccttgaaggaagtcagctgccattcggtctgttccacttgtcttggtctaagctcgttgccacgatcgtcctgccggacgttgtcctcgcgattcccccataccctgtcaaacagaagaatatcggcccctctgaacgggaccttaccattaagctcaagcctgcgttcgatcccggagcttttgccttctacgggataatagtgaatgcgaatgttgtacaaaccgctcacttgaacgggaacatcccatcgaatggttccagtttccggcgtaattacggcatttccgtctaatccggcgtacccttgcacaacctcaaattctccatcctctgcctgaacataagattcgccttcgatgcgtacaatttcatccggtttggccgtattgtcatgagcagtcagataatgctcataactgaatgaatcctcggttcccgataccgcctcaaagtcctcaagcgcatgtaccgttcccggattacgatcccgcgatggatatagtgtccatatggagagcaccaaggccaggacaagcaccaggattagtccctttttcttacgtgaccgcatgtttgaatgtatcccctttcctgtaagcgttgagagaactgaacgattgactaacccggacagaccgcaccttcactggtgcgttctgcccgtgtaacgtgatacttatttgtaaacctcatcaatcgcagcctggaaaggagccttgtatttctcgatcagcgtagatacggataccccttctttgagttccccatcaaaatcccagaacggcaaggacgggaatgtgttatggtcgagaaccaacataccttccgcaacctctctggcgttgttgatatctgcttcatcggtcagatgtgtctccagtgtggattgtcccggatactcatagatcgattcgatctcattaattttctcccagatgtacatcagttgttccggattctctactgcttttggaatcgttatagcttggtaacgtgactcaccggagtgatacgctgttgcacttggaccttttggaaacgggacaaaaccaatatcgtagtccttcatatccgtcataataccttcaacttcgtacatggcacctgaatacatcaaggtgttgccttgacggaagaacgtggatggctctgtccaatcgccgccctcagaagctctaccgaccttctcggtagccagtttggacaggaagttcaacgcttcttttgtttttggatcttccaggttctgcttatcctctttggtcagagaagcctcgttggaatacagaatcggttccagcaagccagtttgagcgagtccccaagtgtctagcttgccatcattgtttcgatccttgttcgcttgcttggcaacactgatgaacgtatcccagttccattcatcggcatccacatactcctgaagtggcttcaagccgagctcttgcatgagtgtgcgattatagaaaattccgttgataaacgaggactggtcctcggtaaagccgtaacctttgccttcatactgcatgtattccttggttgttttctggttgaataccttgtcgtttttaatataatcatccaccggccataacagatcctgtttggtcaatgccggaatggcatagtttttgcccagtctcaccagatcgccaagcggttcaccggccatcagggaagcaactactttttcctgatattcaccaaaatcgatggaaacatattcaatattaaagttgtgttttttcttcagcgcttcgagattctcaagacgttgaatgttgtccgggttgttcccctgtatttccatgtcccaccaagcaacaaccttgatcgttctgccacccatgtcaaagtccatttctggcgtggagttttcattctttggctcggtttccgcgggtttttgttcctcctgtggtgttgtcttttccggctcgggttgagcggtaggtgcagaactgcatgcagcaatcaccaacaagaccgcaaataccaggctcagtagcatgaacttgtgttttctcatcgtcttcccccctgattgtcgtttgctatcacagtgtatcgttcaaatgaaagcgcaaacaacctgccgaaatacagatgtttacccgggctgaatatagatttgcgtaattttgcacgagcaaagtgcattataggttttaattggtaaagaaatgcactgtctacaaaaatatgcacattgtatgcgctttcttttattaccataatgaaattaagtcaaatttcagttaatctagcgcattacaattcagcagaaggtgaggtattgcttcatgtatgatattttacttgtggatttcagccgtcgtttgtgcggagagttgcaacagatgttgctacggagcaaagctcaatatactatcgcaaattgtgtgttctcatcggccgaggctttgaccgcattgtcagaacgagacttttcccttgttatggtacatacagagaggtttgataccgcggggctctggttatgcaatgacatccgaaaaaaaagtcagatacctatcctcctgatgggtggaagagatcacttcaggtttgtacgcaaagccctgacgtatcaggtaaatgattatctcccgtatcctgttagtccttcttctttacttaacagtctgcatggacttagatcccaccttgaaaccgacccggcacacaaaacgtcgtcgttcttcaaaacacccgttcaaatgaacggtaaacccatgcactccagtcatgttattcgtatcgttaaggcctatgtacgggatcatctgagtgatgaaatcacgctgaagaagatctctgacatgcttcattttaactgtgcgtaccttggacagaagtttaagctggaagagaagatgtctttcaatgattatatgctccagcaacgtatggaaaaggcacagcagttgttgtcttccacgaatctgcgaatatatgagattgctattgaggtaggttataaggatattgattggttctataaaaagttcaaagcgtatgccggatcgagtcccaatgcttatagaagacaaaaaatccacacggcctaaaggtggatcgccgaatcggtttgtttatcaattagataataaccacaaaaaaacgcaggatgtattctacttcctgcgtttttttgtggttgtttgggtttggtcaattccagagtattcaccgttaacgtaccaaaagggattcccggtattcttggggagtcattcccgttattttcttaaaaagtcgggtaaatgaatgggcagcctcgtaccccacttgaagtgcgacctcacgcaccataagatttgtgttctgaagcaattctttggctttccgtattcggcagtcgtcaatgaactctgacacgtttattcccatttcctgcttaaagaatcgcgacagataggatggattaaaatgatgaagttctgccagtctcaccagagagagatctttctccaggttctccttgacgtaactgcataaggaatgaatgacaacgttagcgcgttcctgttcatttgatcttttgtagcgtactaattcatcggcagcacgatatagaaattgtactgcatccttcatgcaggtatactcccctaagtgcagcaagcttcgttgatccgggattttctgttgaaggccccaacgattgatcgttgaatgcaataataaggccagattgtagtatgtctccatggcacgttccatcgtaatatcctgttgcatcagttctcctgcaagctcctcaaatatatcgtaaaatggctgaattcgtcccgtttccaaatatcctgacataatctcgatccggtttgagatccgcatggattctttgggtacatcagatgagagatcattacgatggtccgtgagtaccatggatacaccatccccaattttcatccactggagtaatctcagacgttcatattgtttggttaactcggaccaattgcaactgcgactacttaatgaaaaagcaatggatacgccgagtgagaccatgcatgcttcctgtaccagttccagtgtaccttctagaaatcgcacaagtttatcatttgtcatctcttcctcctgcttcggctgaagcagccagatcgtatccccataatggtccgttacacttgcgcacactgtacgttcactcatcagagaagagccgataatgcgcacagattcttgaacttgtgtgaggtccgaacctttttctggcagattattgaaccgacccagtatgagataaacaggcgagttgatctgtaatcttatatctcgtttggataattcgtcctgcatatgcatagtagaatctataaccgctgtacagtcttgaagtaacttccgtaaatactctttttgctgtatcagtgcaagctgcgaattaactttatgagaatgttccaacaactcaaccatgctgtgactttgccggatctcttccatcacatcttctacaacagacatcaccttgtcataaccttccgttttgagcaaataacgcacattagccatctgaaaagcttgatatgcataatcaaaatcgctatgtcctgtcagaaaaatgacacgacaattcggccaactggcttgaatccgctctgtcagttccaacccactcatacccggcatacggatgtccgttagaacaatgtcaattctcgaacgttgcatccaggacaatgcttctgttgcagagtaggccttacatacatcaagctgttcgggtatatgtctggcgaacgtttcatagagactatccgtaataatctcctcgtcatctacaatcaaaagtcgatacattcgttttccccctctttccactggattcgaattgtgacttttaacccttgcagttcacttctggatagaaaaagcccacttccttctccatacgtcaggaccagacgtcgatgaatatttattaacgccgtcatttcgtctgtacctccgtccttatgcaagcgttgttgaagagtttgaatgtgttgctcttccaactcattaccattatcctctacggtgatctcggcatatgaaccttccatattaaacccaataattagaagaccggagtccgtattcttttcaaggctgtgttcgtaggcattctcaataataggttgaataatgagtctgggaactttaatatgttccatctcagaaggtagtgacccaaaatcaactttgattcgtctggagaatcgtaattgttgaatctctgtatagatccgtgaatgctcaacttccactttcaacttcacatgatctgtttcattccgcgtaatgaacctgaaatactctccgagcatgttggtgaattgctcaatacgttcggtttctcctgtccttgccagtgaattcagaataaagaagctattgtacagaaaatgaggattaatctgcgattgaagctgtttcaactcggcccgctgcatcatcaatgttttcttaaaatctcgatcgataagggattgaagattttcaatcattagattgaaacgggtgtagaggaagccgaattcatcctttcggttatgcgcaatggggacatcaagcatgcctccctccatttttttgaatcttttcaccaacaacagcaacgggatatgaatcaacttgtaacttgaatagagatacgccgtgatggcaacaaatgatgtaattgcaaacagccaagcccaatgatagaacttgctaagtggcttcgtaacaattgcctcgggtagatatgtagctacggataagcccagggagtccatatgcaactgactaacatggtacatggtgtcccccaccttcatccgaaagccatcaagtgtaccctttacactgtgctcacggtaattcgcgagaataacactagcttgttgtttatctgtgatggcatgccccgttttgtcctcaatcagaaacgttgaactctccgggtacaaattaagccgtgtgagttcattctgaaaatggtatgtatccagctccacttgaatgacaaaaagcgggggttctcctctcgtgcctgtcagcctgacggcacttaagttcaaggcgtcctctttcaccgtgaaacgtgtaccttttccttgcatgcctgaactgaaatatagataagaacttttatcgaaatcatcgatgccttggatcgcggatatactcttgccaacagaagggatatgtacatgaacgtttttgatataagcagtgctattcttgaatgaagcgagtcgttcagtcaggtaatttaatgtatcacgccgctcaacctgatccatcatgtcccagagaatcgccagacgattgagttttcgatcctcaacgatatcaaactgctgtaattccatccattctatctctctgttcaattccaccacatattgattcaaccgtctctccgttgacaacgatatctcctggcttgcattgtcataactccaatgatacagatacacgccaagaagaataagaggaagcacaaataccagataggtgattattaatcgcgcaaatatactgttaaaccatgatttagcagggatcttgatcaatacattcacctccaatgccaaaggctgagtgggttccttgtatgaataaagtgaacattagcgctcctttggcttgctggcgcgaaaccacgcgttaacctccgatgtgatctgatctccccccagcttgcgccagttctcaacgaattgatcaaactcatctatcgacctgcctagaataatgttcatataggcttcaagctgaagatcccgaagaataatttgtcgatcaaccattgtgtccgtaattccgcccgtgaattgatcatagagaagttggccgttcttctcgtaagaatctgcaatgctaaaagcacccgaaggcccataggtttgtttccagccccagccgctctctacatcttccaattcataggcgacaatgcgtttgtgaatggcgagagcttcattctgcagagcccagaagtctcctgtacttctggcatcacgaatttgtttgtatgcatctatatttttattaccgggaaaaggagttaccggtgaaagcatccacacagctcgggagtcgtcattgtagtatgtttcatactgtgcctgatccccccagttgatgtccagatgcagattcatgagctttacaacaacttccggattagagaatcccttttttacagcaaagtattgcccagtgttggaacgtagcggtacgaacaggctccggtccgacttggcaacaatgggatatgcctgccattctacatctatatctgtatctttatcacgggtgctctgaagcataaaggatgtccactgttcgccgtaaagcatccctatttttccatcttgaactagacgaaacgccttgtttccacttttataaccaaaatccggatcaagttggccttcacgatacaacgtttgcagtactttcagagcctcccgaacttcaggctgtatacctccataagtgaggtttccttctgcatctttaacccatatattagggtaggcaccgtagccggacatgaaccctgcagctcccataactggatcccatagatggttcgttagcgcaagtccgtacgtatcatgctctccgttcccgtcggggtcctcctctgtaaacgctttcgaaacctggagaagctcttccatcgtttcaggcggccgtagccccagttgctccaaccaatcggttctaatccacaggtactgcgctgtctcaatggaggaagatgattcgggaatagccatgagtttgccatcaatggttgccgcatcaaatgcgcctcttccctccgcctccaatatactctttgtaagtggggaagcatactcttggtacacatgggttaaatcttcgatcattccagcattgctcagttgtctaagttgatatggattaactttcactacatctggaaaacgtcctgcagcaagggatacacccaacttctgattgtatacatccccattagcagtccagtcatagtgaatttgaatacctagctctttctcgtacaaacgagtccagcgattatccagtatcgtctcaccaggtaactgactaatcatgcgctcaaggtcatctcccgtttccctgacaaaagagaccacgatgggaggagaatacctctcaaacgtagcgggaagttgaatctgctgcccatcttgctgcggatgatgttgtttgctattaccttcggtatgacctgctggtatggatacagcaaggaacagaatgaaggtccatcttgttatgtccagacatctcttatacatgacgacatgcccccagttcggtttgaacaactctcttctctctgtcaactttaatccatatcattgtacaacaacttgtactcattgaatacgaaaagccgccgttgggcggcttttacgtattttcattgtttctcatcaggattaatcacgcgatattcaaaattcgaaaagtcagctgttcctccagctatttcagttgaatatacaaacaaccctgttcggcaacccataaaatgatccagtttatatatcattttgtggacaatccctatatctctccattcagttccatcgaaataggcaaaagagcactcatccagattgttctcaaaatttccgaatgcttttagtttaactactgaatctgataccgggatacgttcatgttcagtggctggcttctggtcgatcagattaccaaatatggtggaatcctcactatctctggcatgcatgaccaagtaaaacttgttatcctgcttcgtgagagcgatcataccgtacgaaccgattagaaagcacaacccggcatagtccccatcattcagacgactgccgtcaagcgtaactattgcttcgcaagcgggccccattgaacgctgggttagtgtgttgaccgcaaacgtcagatttgggctgatctgtcccgttcgaacacgatacacccccgatttctctgtaacggaccagagttcatgattaggtgtatgattccattgccaaaaatcacggaggcagatgtttccatcttcctcgggttcataattaaaactgtcgctacccactaacgggttataacggtgctctggtctcgtgctcgggatatcaatctgtttcggcgctttgcttgcaaacacgggtataccttgatcaaagtgtagcggaaccaaaacaggaacccggccaacagccccatgatcctgaaacagcattgcataccagtctccatccggcgtatccacgataccgccctgagcaacacctgaattgaaataatccatatcgtcattgaatacttctccaccagtgaagacatcttccagagagtctgccatataaaacgcctgtgttctacgtccggaagctttcgtgatatgaatcaggaacacaatatatttaccactgatcttgtaaaaatgtgctccttcataaccaaggtgatgaggctgctcgtcttttacaatcaagcgatgcactccaccaggtttgggcccggacagatcagagcttaattcggtcagataaatctcggtattaccgtacacgagatatgctcgttcatcatcgtcaaaaaataaggagcaatcatggtagaacccttccacgatctgtttcttccacactcccgagatggaggtcgacgtatacaagtatgtcttacgggtatcattcgcaacaaagatcacatagaacatcccttgatgatagcggagtgatgcagcccacatgcctttactataaacgtgatgaccatccaccagccgttgtgcaggtgtatcgtccaatgtgtcgtatacatatgtggctacttcccaatggatcaggtcatatgaacgcaggatgacacatcccggcatcatatgcatggttgtactgaccatataatatgtgtcttctacacgaataacgtcaagatccgggcaatcagcccaaataatcggattcggatacatactttaattacacctcattttgtctgttaaacttccattctcttaataggatggttgagctgtctgttgaacttttaagcttaatatacaagtcttgcacacctttcgcacccgtaacattagttgttagttccatccagtgaagggattcggtcgcaggcggaacaatgatttctccaattaacagtccgtctgcacgatcaagtcgaagttctaacgtaccttcggttccttgattcgcaatcgtggctgtgaaggttgtgggtccttcactttcaaagtccaccttcgatatagctatccagctgtcattttgcagtttagcggaaatcatattcgaatctgatgcagacatctcaccagagtcaagatattgctctgttgatactccgctactccatccaatcgttgaaccgcttacccgccgataaggatcgaagcatttgatttgatctacaccctgataatcggcatgtaccttcttgatcttacccgtggcctcatcatgttcgactcgattcagatgtgttgaacggtaaccttcgggaatatccatggcttggcataatgtctgggcatgataggcaatgtaccattgatccgatagttgaaatatagcatggtgattgttgccgccaatatcaaaaaagtgtcctggattctggagtagcgtaccctgatatgtccatggccccattggctgaacactggtcatatatgcaatctcaccaggtggtgggctgccatctggccgatcaccttcaataaaattggaacaatacgtaaagtagtaactattattatatttatgtatccctgaatcttcaaacatataaggcgcctgaataaccttcgctttgccaacaacgctgatcatatcgtctcccaatcgcataactcttgccgtatccggtctttctgctttcccctgtggaataccaccaccgaaatagatgtaggcctgatgatcatcatctacaatgacagccggatcgaatagccaggttacttcctccactcccggagtctctcttgtaataagtgcttttcctatagggtctatccatggacctacaggtgtgggtgcagacagtacacctattccactggcattgttggcgaaataaagaaagaaacagtccttgccatccaagattcgatgagcagctgccggggcccaggattgtgaagcccatgttgctgcgccttgaggtccagccactctgatctccccatgatcggtccagttgattaagtcatccgaagaaatgaccgtaatccggttgattgaactgtagctgtttttctgaggaagaccgtccttatcatattccagcttatcactagtcatatataagtagactcgattgttaaataccaaagcatagggatcggctccaaatttgtgggccaccaaagggttaccgttggaacgaagctttccaatctcccctggaatacgctccagattggcagcttggtcttgcttttgctcaccagcttgtggtgtagaatgatgattcatcaaaagaatccccctataatcgtttttagttgtgtctttttacgagaaagcgtttgcaatacaaaaggtatcatgataggatgattacattttaaggtaagctgagtacaatttcattgcgttaaccgctctatttattgcgtgaaatgacgggaggtacttcatgagtggatcctctgagtgtttttatgatcccatccagcctgagctcttatatctacacagcgtaacgacgtataagttggaaacgagctatcatcgccataatgcatacgagatctacctgtttcttcgtggcaacgttcacttttatgtagaaaatcgatgttaccatgtacagcctggtgatctgcttgtgatgtcacccgaggagatgcaccgagcctttattctggatgaatctgagtatgagcgaattacaatcaacctcaaaaaaacatatctatttcaactttccacaccatcaaccaatctatcgtcatgttttgatcatcgccccaaaggaacaggcaacatcgtacatctagacgacgataacttgaagcagatgctgcaatgtacaaacgaactggaaggattacttgcttccgatgcttatggcaccgatatcaaaataaatgcagccgtagcccaattgttggtcatgattaacgtctggtttcataacaattcctttgttcccaatgacattatgcctgaactggttcgtgaaaccatggattatattgaaacacatctgaatcaagatattacgcttcgcaaacttgccgaagtgttctacatgaacagtacttatatcagccgccagttcaaaaagcatactggattgaccatccgttcctacattttgggtcgtcgtattgaacgggccaaattccacctgtctgaaggaatgagtattacggatgcatgctttcaatcgggctttagtgactatgccaattttattcgcagttttaccaaaatggttggcatctcccccggtagatatatcaaacaaagacgtgatgcaattgaagcactgccaaaataatggtgagctcattcaatgtaaactaaaaaacatcaagccatcctgcatggctcgatgttctttaagttcttgatatactacttcggatctgcaaacaattcattattgtgattatatccgcaagttaattgatctctttgcccgtccacaatcgaacgcgatctttaatccactccgtatactgctgttccatgcctactgcacctgcattatcaagttcggtaatcatattgtcatatatgccttcaaaggcactcggagaggatgtaatcgcttcggcgatccgtttctgaataatatcctgcgttttctggtacacaacgttataatccccgctatccgaaggaatcggcatattgtaagcagcaccccactctttcaccggaaactccttttcggaagggaacaagtccttccatgtggtgatgccatagcctttcaaagcttctttttcctcatcggaataactttgctgaatctgttcaggataattcgttgtatagtagttatccgttgaatctttgacgccatccccgtaatgagcaccaaaaatgtaatacaagcctactccggtttctttggtgaatgtgttattgtctttgtttttacgttcctgtacatcggctgggatggtgcgaacaccgtcttccactttatattgctcgccttcaacgccccagtttctcaatacttgcccttcttcagaagacatccagtccaaaaatttaatagcccggacaggatcttcacaatcgacagttatgccaatgccataaccgtcaaagccaatattctggaaatctttacgctgaaagttgtcatctagcgtgaccggatagaatccgtaggtcatgtcgtctttccctgcacttttcaaagcattttccgcatcactgaatccccagcttggatcaagcaaggataacacgcgaccactggcgattttggacttatactggtcatccttctgaacaaaactgtccttatccagcaagccttcattgtacatcttgttcaaccaccggaaatattccttctcctcgggacgtttgtaatgcagaacggcttcgtaggtgtccggattgatgaaatattcaccatctccaggtcctccagtagacatgacagcgggatcagtaaccgtgatcattcgccgccatccatctgcactaagcgtcagcggaattgtgggttggccatcatctgtggtcggatgtttctcgtaatattcacgtagcactttttcgaaatcgtttaaggttttgatctcaggatacccaagttccttgactacacgatgttgaatggcggtaccattcgtcgcatcaaagctgacctgatcgattgcaccattcgttggaatccaatagattgaaggatcgtcattactgtatttcaaccgattgaagtgctcaccgtagatctttttcaagttgggggcatgttcttcgatcagatctgtcagatcaatcattgcccctgcatcaacgagtctggtcaagttacctttggggaaaatcaaatccggataatcaccgcttgcagccatcaaggaaatacggtcgtttccgcctccgctcgaaatatcgaattcagcatcaatgcttacaccggtttcttccgtaattttcttccctaccgcatcctgcattttgttccagttgggacttgcatctgcgccgaagaaggtaaatgtgatcgggctgttggggtcactcgtatttgattcggaattctctccagcatttccgcaaccggcggaaactaacacaacacttgttacgagacatgctcctagcacttttgatacggctctcattatttttctgccccctaaatgatgttagtcgtaataaccaatccagacattacgatggttcactttgagatagtatacgcttacatattcaaccgttagtaaacgactacaaccctgcctaccctattccatgtttaaagtataaggaagtctaataaccccaaccttgattattaagccatgaaaatagcatgatctagacatgagtctcagtaaaaatgtaaagaccaaaaaagcgatggttgcccatcgcctcataaagccaaggctaattttcaataatataattccaacgtaaatccttggatctccccttcaacttcccgcaacaattccattagttggtcagcgtaatctccaagaatctctttgcttttctcaaaaccaatccattgaacagtaagcggcatgcatacagccccagttaagacatcccatagtgcgtccaaattgcctccatagctctcgtctaactcaagctggttctgcaaaatttgatgaagctcttccttgctgtgaaagtcgtttccgttaatctgaatgatgctcatatcatttcctccgtttattttaactgttcaaatgacttgtaatgatctgtcgtctggtagattagaccgtcattcgagtatagaattcggtcgcttccgcgtcgtcctcctgagtaatttatatcggcttcgtaccagatccggccttttttgttggggagtaatccttcccggttcctgaacacgtcgccgccgatacttttgcctggagcaacttctcgcaggttaccttcgcttggttcccatcccagttctctggcctctttcttggtaatgtaatttggtgggagttcattgtgttccgagatataattggcaacctcatcaaatcccatatcctccgaaacttgaggtgatccgagatcacgcaaagactctgacgtacaacctgagaacaataatgcagcgaggatgatcactaacgtgtaagcaaattttctgaaaaacataatcttttctccttttgatgttcttgctcttgctgtcttccgttttggtgctatttcgatgacaatgcttctaatgttaacgatttgtggtaattaaagcaattctgtaagcctattatggagttgaaattcaatcaattaaagctgttgccttgctccattgaagcattatttttattctacaacaaaaaaagccgctaaaatagcgactttaatcgtaccacgatcattaccattcaacacattcatttaatagtttaatttaatgtatccatccagttctctagggctacaacaacctcttccaactgcttttcttctgtaattgcaggttgattatctcctttttgcatgccatatgagccaaactgaccgtgatttccaccctcaatactcacatatgtcgtatcttccggaagatttgctttggagttctcccagtcttccctgttaagcactccgtcatccgaacctgtaatctgtaagatagacaagtccgtattctttacgctccccccttcatctgaataagaagccaagaaaaagacgccttccaacttctcattgtgctccgcagcataccgtgatgcaaatgagcctcccaaagaatggccaccaataacaaacgcttcgtcaggatgttcctcgataaaggaatcagccttgttttgaccgaaaatcgccaagtttattggcatgttcgcgatatatacgcggtgaccctgttctgccatttctctggcaaatggagaataactttcaggttcaaccagaccacctggataaaaaataatattcggtttggttatctctgtacccacgggttcaaatcggtaaccgtccttaagcttggcgacattaacctgcgcatcacttgtcatcgccgtttcagctcgctcagagggactatacgtaaccgaattgagatatacgaatactccggccacgaggataacgatggacaagattgtccacatgattatttttttccaattgttagtacgttgtgctgttttcaaccttaaaaccaccttagtatgaggataatgatatgtcttttttaactcttcataattatacttaccggtaagtataattacaagatgattttgcttactatcgttatttgtcataaaatattcatggagggaagttcaatgacagaaaaatcacccaaacgattgcctggaagacccaaacatggcaacgacgatatctcaattcagcaaaccattattcaaactgcttcacagttattcatggagtatggctacgaaacagtcacgcttcagcagattggcaaaacatgtagtgtatcaaaaccaaccatttattatcatttcaccagcaaaccagagctttttaaggttgcctttacaacgatgttacagaatgtgagccggttaacctcgcatatccttgatcaagccgagaatctggagtcggggcttgttcgtctggcagaggccagactgggtaatccacatgcggagattgaaaccatgctgagagaagctgagccttttcttgaaccagctcaaattcaggatatacgcaacgcggagcatcagattcacgaagtgttagcttcccatttccaacgggcaatggatgaaaacagactacgaacggacgatccatttttcctggcagagaccttctcgacattgatgttaatgggaaatcgggaagataacctgcataaatatggttccaacttttcgctaggccagaagctagtagatattttcattcgcggagcgcagtaaaactgaactgattatgtattagtggttagtttacatctttaattggtcaatcgctttatccattctgctcgagacgagaaattctaccctatataagcatgataaacgcaaaggaaggtgtagttttggaaattctaacatggcaagaggttcacttgatacttcctcttctcatagagatcaagaataaagctgtatttgtgtattccgtacttgagcaaaaacaacaaggaactgtatacgtaaacaacaagcacaacataacttcagccctgatcacaagctgtggtggtttttactgtttactggggacggcaagcaatccaaaatttaatgatgacgtcattcgatttttaataaacaaagagaatcataaaatagatttttatgcactggcactattttcggaagattggatcgatttacttgataactatgaattaccgaacgcaaagaaaatcaaacgcacatatttttcgttcaataagatgaagtttaccgagagataccaaggagatactctcactttaggtaaacactttaaactcgtagaattaaatccatccatcgcaacgaagtacattaaggatttttactcctactattcaattgtatgggactctgtaccgcactttattgctaatggtattgcgcattttattactcgagatagtgaaattgttagcgtctgctcttccccatatgtaggtggtggttatgcggagatcgatatcatcacacttgaggaacataagatgcagggattggctacagctgtcggcgttcggttcattcaagagtgtataaacaaaggattagtaccgaactggtgctgtcacgccgataatattgaatcattacatatggcaaacaagctttgttttgataagatcgaggagcaaccaatgtattggtataatgcataaatgtgcaaaattcagggcaacaaggagagctgacatgaatatccctagaggaacctatgggtttcgattcgcggaagacaaggagctccaactatgtgtactgtatgcggctggatgtgattcaataaccgatccttcttatcattgggatggactcgaacgttcggacgggcctctcctgttattccaatatacaatctcgggtgaaggtgtatttgagtcgaataatcgcattcatcatgttaccgcaggacaagcttttttggcagaaattccagggccacatcgctattactaccattcagcatcaaaagaaccttgggagtttctgttcctgctgttcaggcccactcttattctgccccattggcgaaaatttcttcgtgaagcgggagaagttccctatcttcccgctgattgtacacccatccgactgttgcggatgatcgtgactgatgcggcggcaggcagaatcacggatcctctgatcgcatcatccagcgtatatcagttcatgacagaattgactcgattacagaaaacaacattgcgcaacagggagaattggtctgaaaacattcaaatagccgttgaatacatagaaaacaactactccaagatgatcagtatcgatcaccttgcggagcatgtttccctttccaaatatcattttatacgtcgcttttcctccagtacgggcttgacgccaggtgtttatctgacccgtgtacgtaccgagaaagcaatggaactgctgcgcggaacttctcttagcattgaagtcattgccgagcaagtcgggtattccagcggaagttattttatcaaagcctttcgcagcataaccggcgttacgccaggtgaatttcgtagtggcggagaaagccttgtgtaccgtaaattgttctttgattaaccacaatattttgctattccacactcaacattactgtagatattaataaaatcctttattatgatgaattgagcgagagcaataattaatccataaaggagcattcccatgaatcatacgcttgcagcatcaactccaccgcttggctggaacagctgggattgttacggcgcagccgttacggaagacgaaattcgtggcaacgccgagtacatggcagaacatcttaaagacttcggctggagctatattacggtcgacattcaatggtacgagcctttggccaattcttcgcaatatcgtccgttcgttccactcatcatggatgaatattcgcggcttatgcctgccgagaatcggtttccctccgctgcaggtggacagggatttaagccattagccgactacgttcatagtcttgggctgcaatttggcattcacatcatgcgcggtattccacgtcaagctgcacatgccgctactccaatcctgggcacaaccgccactgcgcgcgatattgctcatccaaattccatctgtccgtggaatacagatatgtatggtgttgatagctcaaaagaaggcgcacaagcctattacgattcgctttttgaactgtatgcacaatggggcgttgacttggtgaaggtcgacgatattgctgcttcaaggctctatgacacccatcagcctgagatcgaaatgatatccaaagcgattgagcgctccggtcggcccatggtactaagtctctctcctggccctgctccggtggaatactcagaattcttggctgatcatgccaacatgtggcgtgtcacagacgatttctgggacctttggccgctattattggatatgttcgaccgctgccggacgtggcagggcgttccccaagcaggctgctggccagactgtgatatgttgcctttgggtcatatcggtatccgttctgtagacggtggtggagcagatcgctggactcggttcacacctgacgagcagttgacgatgatgtcactgtggagcatcttccgttccccgctcatttttggtggtgaactgcgagataacgatgactggacactgtccctgttaaccaatcgtgaggttctgcgaatgcatcgcgagagttacggagccagagaagccttacgcaaagaagatcttattgtgtggactgcccagcatgcggatggttcctcttacgtcgctgtgttcaacatcggtgagaatgctctacctctggatctgtccattgatgaggtcggactgtccggcattaccgaaggtaccgaattgtggagccgagaagcagctcaattaacagagaattccttagttattactgtacctgcgcacggtgtgcgtctctatcgcttttcctaagcttgcaaaagaaaaagagaggtctgtcgttcattagacagacctctctctcatttcatcagtatgtatccatggcttgaacggccagatgaaatgctttaattcttctttccagaagagtcttttgcgggctaccttctttggaattggcatacatgctctctagagatgggaacaatcccatcaagacaagacaagcttctgcgatatcttcctccgtgtagggatgagatttctgattccataccttttccaacagtgctagtccgatgtataaagcttgaagacgtttctgtaacaatgtcgtgttattccttttctcagtcatattcactaaggcattttccgattttcggatggttgattgaaaagctttgatggattgcagctgatcttcttgtgacacgttttccatagagtatagacctcactttcttggcttagttataatcggtctttctattaaatcacctcataaatataacaaaaaaagccgcttaaatagcgactttcaatgtgttcattctcgattcagtgctagagtaccttttccaaaaagctgatcgtccgttcattcttcggatttccaaatatctcttcaggagtgccctgctcgacaatataaccaccgtccatgaagatcacacgatcagctacttcacgggcaaaacccatctcatgggtaacgatcatcatcgtcatgccttcgctcgcgaggtccttcataacaccaaggacttctcctaccatttcagggtccagtgctgaagtcggttcatcaaataacataacatccggattcatagcaagcgcacgagcgatagcaacccgttgcttttgtccacctgacaattgtgttgggaagctatctgctttatcagacaagcccacacgctcaagtaatttgagtgctgtatcacgcgcctgctgtgcatttaatatcccgagttctctgggcgcaaacatgatgtttttaagtacactaaaatgagggaacaagttaaaatgttgaaataccatgccaatattttcgcgagctttgttcaggttcgttttagggtcattcagatcctgatcatccacaataacccggcctgccgtaatcacatctaattggttaatgcagcgcaagaaggtactttttcccgaaccggaaggcccgatgacacagacaacttctccttcgttgaccgccacatcaattcccttgaggacctgattcgagccgaaacttttcttcaaaccttcaacttttattttagccacgacgaaccttcacctccagataatcagcaattttggtcaatgtgataatgacaatcaggtacataaccgcaaccgttaaccatatgtcaaaagaggagaacgttcttgcaataacaattttacccgattgtgtcaactctacgagaccaataacggataagattgacgtatccttcaacgtgataaccatctggttaatgaaggacggaatcataacccgcactgcctgcggaataacgatctttatcatcgctttgcgataaggaatgcccaatgaacgggcagcttccatctgaccacgatcaatcgattgaatcccgcctcggataatctcggttacgtacgcccctgcattcagactaagtgtcagaatagccgccaggaacaatggcatcgtgaagcccatcgcctgtggaatcccgaaatagataaagaatgccaggacaatcagcggaataccgcggaagatatccacaaatacggtggcaacaactcgaaggaatttgttctgtcccaccttcatgaatccgaaaatcagaccgatgataaacgcgaagaacagggatacaatcgtgtataaaagtgtttttcccagacctttaaaaagtgcaggaagagatttctgtattaactcccaacgccccagatttgcgacttgggaattctctccaacatattcttcgataatgcgcttgtactcaccgtttgctttgatattcacaagaccagcattgaacatctccagaagttcctgatttttacccttacttaccgcaaatccgtaggaagccccgtcttctttggcggtaacgattttcaaaccattattctgctttaccccatatcttagaacgggttcatcttcaaaacaggccaccgaattaccggtctttacatcatcatacatttgatatgattcatcgaatggaacaacggtaaagccatattttgaggcgatggactcagcaaagctgtacccttctgttcccgtttttacagcgacctttttaccacgaagatcttcgtaacttttaatggtatcattattggaactaatccccataacaacgcctgaatcataatatggctctgaaaaatcaaattttgcttttcgctcatccgtaatactcatccctgcgattacaccatcgacttgattcgcctcaagtgcctgtacagctgcgttaaatcccagggatttgatttgatacttgaaattttgatctttggcgatggcatccagcaaatccatgtcgataccaacaaaatcaccattctcatcttcatattcgaatggagcaaatgtgacatcagttccgataacataggttttaccggaatcggacgctgcagcagcgttccctacccatcccgatagaccgctcaccaggagcagcatcagtgaaagtataaaaaatgagatcttcgttgttttcatgtgtcctccccgtctcggtattgtccgaataatcattattttctttggaatcggtattacggttatgcttattgtcgatcttctgcccatttgattgttattatttactgtatattaacaatcaatgctttgcctttccacttgcaacattttcctccatcatttttttccaaccagtaaaagtccttttaatacttaccctttaggtaagcttcgcgaaacccaatattacattgtgaatcggaaaaaaggtacatttactttaaaacgtattatttaaaatttaaaactcaaaaaaagccgcgatttccgcgactttttattgtacagttttttataatctattaatttgctctggttgtcaatacaatctcgaacttcgaaccagcttcacccgcgaatacaatagttccgttctcaggcaacacaatttcgttttgtccactgaccactgtatgattaatgcctatgccagcttggttatatacagcaaatgcgctgtttgcagacatcttgaccttcatttctttacctgcagctgatgctggaatcgaataccatgtggcatgaccattcgcttgaatggttgtttttgattgtttccccgcatagatcggttttataatatcttgagcagcataaacgttgcctccagctgtaacgtattccacgccattttcctcatagaaattaaactccatcgtgtcacggcccgctaatccaggaatttgcaattggttcacagcttggttagctccgataattttgttggtgtagatataaccaggcagctcgttaaaagtatgaatgggaatcatcggcatggctgtgttgtacagtgttgatgtgtatttttcattgaccaacacgtaggctttgcctacccgtttctgccatgcggcctttacttcttccgacaattcattggtttcaagcttttctgccttatattcagaggaagcaacttgcccaagcccaggaacagactgatacgagcgagaccacaaatatgtgttcccgttgacttcctgaacgaacttcagcttttccgtagccgcatcattaacaaatgagccatcaggggtgtacgtataggtctgatcaggactgttaggagtcgacagattagatagcgttaattgcccatcatcttttacgtccatcttcattaacatgtttgccccacccgcgtacatgcctgtgtgctgtgtaagttccttcggcatggttgttttcaccggtgcatcatgtgacttctccggtttacgctctggaatgatattcttctcctcaagcgcactaagcaacagctcagttgccagcaattgatccgttgaactatgaccacccgaagaggttacggcagcagccatattatactccggaagtacaatcaatgaggaatgataggttattgtattgccacctttgcttactgcctggatgccgtaatcattaaaaggaaacaggttcacgctgtcccagcctaagccgtaaccaatagaagaatcgccttcttctggccacatgcctctcttgtattcttcttgctccatggcctctacggattcctccgaaagaacaccttcaacctcacctgtaaagattttcgagaactgaaccagatcttcagcggtggaatagatgcctcccgaggcaatcatatttgtagtctctaatgggagttgctcctcatccgaaggggcatatgttgctgccatctggctgaagtccacaatatcctgcggtgttttggtatgctccataccaaggggttcagttatgtaccggtgcatgaaagttgtgaagtccatgccgctgacccgctcaaccagaatttcagctaatgtaaaaccgtcattactatacaccgagtatgcgccaggatcggccttcagatgttgcgtcgtcaattgttccagtaacgtatcatgggcataggtatcattatctccaaacagtattgcactgttacttgacgttcctagaagtccggatgaatgattcagtaacatgcgtggtgtaatctgttggtaacgcttgtctttcattttaaagtcaggaatatacttcacgacaggctcatcaagatcgatcttgccctggtccactagcttcattacggcggttgtgagcatcattttgctggttgaaccaataccatacatggtatctgaagaaagtgggatgttatttttcaggtcgcttttgcctgcctgaccggagatcacaatctcaccctcatccatcagtgcgtactgcacacttgtcgtagcgtatgattcagtgagtaccttggcttttgcacttactgcctttttagttagatcatacgtagagctactaccgttactggtagcgggtgtggccatggccgacattggggacatcattgcaaacaccaaagttatggcggcgatagacgttcgtttctttcgtgtcaatctcatcttctcctgtctagtctatggattaggaatctctgtgtttgtactcccgtagtgtaaccgaagaagatgaactgtctgtggcttgaatatgaatcgagtatgaaccaagcaggaccaacccaaataggttggacacacggtaaaaatcgctttagttcagctttgttttgtttgcaaattaaacttttgctataatggtatatcaatcaatggagtgccagtaagatggctaagcacataaataaatgcaatccataattcaccatgagtaatggagttgaagcaatgctaaaagttaatcggaatgaccaacgcccgatctggcagcaacttttggatcaagcgatccataatatcacaaccgggaaatggcaaccaggcgaactgctactcccttcacgtgaacttgctcaattaattggtgtttcacgctcaaccatacagattgtgtacgaggaattattcagccgagggtatacggtaacctcccgacgagccgggacaagagttagtgattggacatatgcacctcgttcatcagaaggcgtcacgatgcaagggcctattccgcccgatctgcctacactaaacgaatcgattggtcatctgcatagttggtttggcaatagagacaatcgcaaaatagaaattgattttaatccccacgagccttatctggatgaaagtttcacaaaagcctggaggcaatcttttttacaagcttctactgaacccaatctggatctttgggcttatggcgatgccagagggttattggcgttaagagagcagattcaacgttatttgtcacttgaacgaggcattcatatcgatgttgatcaaatcttgttaacctcaggtgcacaacatagcattgatttaattgcccaggctctcttaagtgagggagacagagtttcggttgaagatcccggcttccctgccgcttggatggcgatgaaataccgccggatgcaagtcgatcccgttccggttgatgagtatggattatgtgtagatcatattcacccacagacgaaactcgtatttgtcacaccttctcatcaatgcgccgttggtgttattatgtcggagccacgcaggcaacaattgatgcacttggcagctcatcatcgatattggattgttgaggatgactacgatagcgaatttaggtaccgtggagatccgcttccaactatatttagtcagcaacctcagaatacgctttatatgatgagtttttccaaaatggttgcacctggcattcgactatccgctatcatcggccccaaaatagccatcgatcgccttacccaagttcatgaattaacctatcgtcatctgccgattatggaacaattaacgctaactcattttattgagcgtggtcattttatgcgccatatgagaagagttcggaacatatatcgacgcagacacgaagttatgaccaaagccattgttgcttctgggttaggctcacgatttacattaagtggcgtggaaacgggattacatatgcttctagaatctgaaacgtcatttgacgaagaagcgctgacaaatgctgcccttgatcaaggtgtacgcgtgtatccgcttagtagatattgcttggagagtcatcgaaaaggatggatattaggttttgcaaaagtggatgaggagcagattgaggaaggcatacatcggcttgcaaagattttattatgatggaaaacatgctctccaatcggattcgaaaggatgttttttgtaatgaaaattttagtgttaggagccaccggacgggttggaagtcatttcgtctctaatgccctacgttccaatcatcatgtaactgcactggttagaagcccggaaaaggtacaaatcaacgatgacaatttcgttctacatcaaggaaacgctttagtcaaagaggatattcatcacgccatacagggtgtggatctcgttgttagttccttaagtaccgatggaacaactacattatcgcaatccatgggacatattgctgaggctatggctcaggagcgtatcaaaagaatcattaccattggtaccgcaggaatattggaaagtcgaacggatcctggcttgcttcgttttcaatcccctgagtccaaacgtaagtccacgcgagcagctgaagagcatctggagatgtacaacattctgaaggcttcagagttagaatggaccatcgtgtgtcctacctacttatttgatggagaatctcttggtaagtaccggattgagcgcgactatttgcctgacggtggaacttctatatctgtaatcgatactgcagagtttgcttatcagcaattaatgtctgatgagtatgtacagtctcgtgtaggtatagcctactagggcgtcttaagtttcaatataaacaagcacattacgagcctgcaattgttatccattaggaacaattgcaggctctatttgtgtctgctgttgagctatttaagcccttcatatagaggaaattgcgaagtgatttcacggacactacctaatatttgatttttcacatccgagttctttggatttttaaaagcaagccctatcagctgagcgatttctttcatttccctggctccaagccctcttgaagtcatagccggagttccaaaacgaataccgcttgtaaccaaaggacttgccgtatcgtgagggattgcatttttattcgccgtaatccctacttcatccagtaaagcttcggcttctttgcctgtaaggcccatagttcgtaagtcaaccaacacgatatgattatctgttcctcccgatacaagggtaagtccttcattcattaaagtttctgccaatacattggcgttattcagaacaccttcaatatatgttgtgaaatcggattgcaatgcctcgcctaatgccaccgctttccccgcgataacgtgcatgaatggcccaccctgggttcccgggaatacagctttgtcgatcgcctttgcccaggagtcccggcacaaaatggctccccctcgtggtcctcgtaaggtcttgtgtgtcgtggttgaaacaaaatgggcatgtggtaccgggttaggatgcaaacctgccgcaacaattcctgctatatgcgccatatctacaaagaaaagagctcccacttcggcggcaatctgggcaaataattcaaactcaatggtccgcgggtatgcacttccacctgcaacaatcatgcgtggacgatacttataagcaagtttacgtacttcgtcaaagtcaatgcggcccgtctgtgcatcgacaccatatgaaacaaaattgtaaaacctacctgaaaaattaacagtacttccgtgtgttagatgaccaccctgggatagattcatgccaagtattgtgtccccaatctcaaccgaggcaaaatatactgccatgttggcctgagaaccggagtgaggctgcacattcgcatgttcagcgccaaaaagtgctttaaggcggctatttgctatctcttcgactgtatcgacatgctcacacccgccataatatcttctgcccggatacccctccgcatatttattggtcaataccgaacctgttgcttccatcacagcttgacttacaaaattctctgatgcaatcagttctatcgtatcccgctgccttccaagctcttgctggacagccattcctattactttatcttgcttctccaaatgtttcatgaacatcttcctctccatattacggttatttagtcgttccaagttgttttttgggaaatttactattcatcagtagatgtgccatcattcctgcaaacagtccccaaaatgcaccacccacaccaagcaaagtcacattcgctgctgtcgccaaaaacgtaatcaatgcagtttcacgtcccttagggtccgttaatgcattggcaagactgccaccgatcgttccaagtaaggctaatcccgctaatgttgcaataaaggtagcaggaagaatcaaaaacagagcagccaatgttacgccaaaaatgccgacaaaaatataaaaaacaccacaagcaatacctgcaatataacgtttggttgaatcctcatgtgcatcctttcctgtacaaatcgctgctgtaatagctgccacattaaaagcatgtgatccgaatggggctgcaagaagcgaacccaaacctgttacagctaaaataggattggcacttgtcttgaatccatcattacgcagaacaagcattccgggcatatactgccctgtcaaggtaataatgaacagcggtagcgcaacgccaagtaaagcatttaacgaaaatgctggaacaacaaatacaggcgatgctacagccaattggatcgtactgaagtctgttttccccatgcatatcaaataaatcaaaccgattgccaatatgccaacaatggcgtaacgggaagtaaaccttcttagcacgatatagcctgcaaacagtacaatcacaagcaaaggatctaccttcgcccctccaaaggccgaaataccaaactgtagtaaaataccagctaacaatccggaagcgatgcctgggggaataagtcgaacgaaacgttcaaacatgcctgacaaacctaaaataataaatccgactgctgaaatcatgtaagcgccaatagcttctggataaggagttaccgctaatgctgaaacgagaaacgccacacccggtgtagaccaggctgtaataatcggttccttatatcgataactgagccaaattcccgttacgcctaccccaatcgagatggaccaaatccaggaagcggtcatttccgggcttaaaccagccacttttgcagcttgaaaaacaaggataaacgtacccccgtaattaacaattacggatattaaagcggcgattatcggagatatcaaatcacggccgcgtaacgaaggggatgctgtcttcatatttaacactacctctcacttaatcatcgatgcgtgtgttttcattccagtaatactcgtccggtaaatagcgttgaccaaatacacttgttcctacacgtatcattgtagctccttcttcaatggcgacttggaagtcaccagacatacccatcgataaaatatccatttctacgcgtggaatatttttctctttaatctgtgtacggatctggtttaacaatcgaaaacaatgtcgtgtttcttcgtttgtcgcattcagttttccaatggtcattaaacctttcacgtttaatgtctcgaattgagccaactgttctacaagctcaacggctgtttctggagaggcaccaaatttactttcttcgtaggacgtattaatttgcacaagaatgtctaaggtcttattctctttgagaagctggttatgtaacgcttgacccagtttcagacgatctacggaatggatgagagtaacatatttaactacgtcctttactttatttgtttgcagatgtccgataaaatgccattccacctgcttgctttgttccatgagtgggaatttgtctcggagttcttgagctttgttttctccaaacaggacctcacctgcttgaatagctatttgtaatttctctagcggtaccgttttggtcgcgagcatcaacttgatgtcctctatgttgcgacctgaagtctggcaggccaatgccatttgctgtcttacagcttgaagattttcttctactagatgtttcatgtcagccaccttctttctattccgaacaggaatgaatcaatgagattagctcctccttatgttgtgaagactgtgtagaacgtcatgctagtatagcaacgcatggattggatatacatatccaaaaatgctcttttggagcactccaaaaagacaaagtggatattaatacaattggggcacctttaatatgcttttaaaaagtcaataatctgattgatgtgatgtccgcacgcttcttccaaaatgaaaaaagccgctaaattagcggcttggtttagttctatgttcatgcccaagaagatacatgttttatgatgatttactcattcacattttccttcgttaccagcttcaattcagcgggaatcgatgactccacctgcttgccactgagcacatccagagctgcttgcagcgccagttggccaatcagtataggctgctgagcgactgttgccgtcaatttcccatcctgaatggatttgattgcatcatcattaccatcaaatccgatgaccggaatgtctttacctgagctttgaatcgcttcaattgcaccaagtgccatctcgtcattatgggcaaataccgcttgtacgtctggattaccttgtagcaagttctccatgacatttaatcctttggaccgatcgaaatcagcagattgtttggaaaccacatcaagttgcttgtcagccacttcatggaaacctttaccccgttctcttgttgcggaagcaccaggcacaccctcaagttcaatgacttttgctccctcacccagttgttccacaaaatattcagctgccatgcgtccacctttaacgttatcagatgccactagtgccgccacttcgcctttatctgcggagcgatccagcgtgatcacaggaatgcccacactattagcggattgaaccgctgtggagatcgctgcagagtccgcggggttaatcagaagtgcactaacaccttgctgaatgagatcatccacatcattggtttgtttcgccgaatcgttctgcgcatccaccacgatgacctgtattccctgttttttggcttcagccattaccccgtccttcagtgatacaaagaatggattgtttagtgtagatatcgacaaacctattttcttctgtccgttacttttgtttgggttaggtttcgcccattccggtggctccagagagcacccggccagaacgatgatcatcagcatacttatgagtgttacagtccactttttcatattcgcttctctccttatgctgttttcttgcggtccagcaggacagcaatggcaatgacgataccttttacaaccatttgataaaatgagtttacttcaagcaagttcaatccattattcaacacgccgataatcagaacaccgatcagtgtaccaacgatgcgtccgcgtcctccagcaagacttgtaccacccaatacaactgctgcgattgcatccagctcgtaggatgtacctgccgttggttgcgctgaattcaaacgcgatgtcagaattgcacctgccagagcagcgagcatacctgtcagggagtagatcataattttcacgcgattaactttgatacccgagataatggaagctttctcattaccgccgatggcgtacgttttacgaccaaaagccgttttatgcaaaacaatccacagaatcatgaaggtaatcagcatcgtgattgcaggtaccggaatgcccagcaggtaaccgcggccaaacagttggaacaataggttatccccgagtcctgtaattggattaccattggtgtacaccaatgtcagtcctctgaatatcgtcatggttgccaatgtagcgataaacggagccattctgcctttggtaatcattagtccgttcaccatacccatgacaccaccgagtgctacaccaataatgatggacaagatcggatcgagaccagacaacatcatatttgctacaaaagcactggataaagccaagattgagccgaccgacagatcaattccacccgtcaggataacaaacgtcataccaaaggcaatcagcgcattaatcgagacttgacgcaataaattcaagatattgagcggttccaagaaacttggattcaacaccgatacgatgagaataagaatgattaagccaagcagcggtcccaatttttgtatcacgtttgagaaacggaatccgcttttagccgttttgttttcctgcattgttgtcatatcactgtccccctgtggccaatgtcataatgtgttcttgtgttgctacttcccttgcaacctcgccactgatgtgtccctcatgcacaaccgcgatccggtcgctcatgccaagcacttcaggcagctccgacgataccatgatgattgcaacgccgcggtcagtcagttcattcatcaattcatagatttcgcgcttcgccccgacatccactccgcgggtaggttcatccaggataagtacgcttggtccgataccaacccatttcgcgataaccaccttctgctggttacccccggatagattccttgccgccgtctcggaggactgcgttttgatctgtagacgtttgatcagtgtatctacgaagtcttgttcttttgaagttgagatgaaacctttgcttgaaaaactgaacagatttggcaacgccatattctcgcgaatagagaagtctaataccagcccttcatccttgcggtcttctgtaataaacccgattccatgtttcactgcatctgccggtttacgaatgttcgcttttttgccgcggatgaagatttcaccgctatccaacgtatccaaaccaaagatggttctcatgatctctgttcgtccagaacccatgagtcctgagaaaccgagtatttcccccgctctcacggtgaagttaatattctcgaatagacctttgctacttgcattccttacttcgaggacaacttcaccataagaaggattccggacaggataacgctcggtaagttcacgacctaccattttccgcaccacttcatcaaagcttgtctgcggaatagcttgtgtgtctaccgttcttccgtcacgcatgatggtaatccggtcacagatcgtgaatatctcctccattcggtgagaaatatagacgatggatacgccttccttcttcagcgaactgattacaccaaacagcttctggatctcacgctccgtaagtgctgctgttggctcatccataatgatgaccttggcatctgtcattagcgctttggcaatctcgatcatctgttgctgcccgacagagcactctcccgcaggacgttccagtggtatgtctacggaaagcttggcgaactgttctttggcaagcgctttcatttgtcttgtgttgagcaatccgaatgatgatgtcatttccttaccaataaagagattatccagcaccgtcatttcaggccatacgttcagctcctgatgtatgaatgtgatccccagtttctcggcttccttcggacttgcaaaatagttttcttctctgtctatgctgatggttccctgatcacgttgatgaagaccaatcaggatgttcatcagtgtggatttgccggctccattctcccccatcagggcatgaacttcaccatcctttagttcaaaatccactccgctcagcacctgattcgttccaaacgctttatgaatgtcttgcatctgaatgtgcattacgcaacctccttttaaccgaaatggactcccgattgtaaaatgcaattggcataaggtgtggcttcacctgtgcggatgaccactttcacctgccgtgttaatgctttgaattgttcgtggctgacggaagcatcgattgcttctaccccgaatttctctgtgatgaattgcatcgctacgggattgccttcgcaaatctcttcagccacaatgactttctcaatgaccatatcttcagcgatcgcttccaccacttcgcgaaaacttggtgttcccagtttgagggccagatcaattttgagtaccccgtccggtaccggcagacctgcatccgcaatcgcaatcatgtccgtatggcccagatcagacaaaatcttggaaatgtgactattcaacatgccatttcttttcattacaagctctcctctacttcatcacgcgtcggcatgccgccctgcgctccgaacttggtgacggacaacgatgcagcccgattggcgaagcgtatactctcttgtaacgcttttccttcagccaaagcaactgcaaatgcggcgttgaacgtatcccctgcccccgtagtatcaacagcctcaactttataagttgggactagaatttcgtcagtgccatcaaagtaccgtacacctttactgccctccgtgatgaacaatttgttaggatactgacgtaatgcctgtgccggactcatgccctgaaacaaaatctcagcttcatgctcgttcggtgtgatatatgcagcgttgtcgatcacttcttgcggcaatgttctcgccggagcgggattaagcagcagcggtgttccgaattctgcacacaatgcactcacatgcacaaccgtttcctccggaatttcctgctgaattaatacgatatctgcgtttcgaattacttcagctgcctcatcgacatatgcaggagtgacttcccgattcgccgcttcaaccactacgatactattatcaccttctgccagaatgatatgagccgttccactttctaaatgtgtaaccggtttcacattttgcgtatttacagcatttgctctaaagttctctacaatatctttgccaaaagcatcgtcgcctacccggccgatcatcgaaacctcggcacccagtcgtgcagcggcaacagcctgattggctcctttgccaccaggaactgttttgaagctatcgccaagaacggtttcccccgctcccggccgtcttgacgaagtaacaaccagatccattgaactgcttccaattacacatattttagccatctgatctcacctttctcgtagtgccccgttcgatgaaacttacgggcaactgtatgtttttattctctattgcagcttgttccacaagctggataagtaatcccgccgcttctcttcccatctcgtatgctggctgacggatggtggacaatgccggcgataacaggctgctcatcggaatatcatcgaaaccaatcacttgtacgtcatcaggaacctttcttccgattcgtgatgcctcatgcagtactgccatggctgcgatgtcattgctcgcaatgaccccgtctgtgtccgcatatttcctgaataattcttcagcccatacacctgcctcgttaattgaaaatgaggtcgtctggatcacccgatagtctaacccagcatcacggatgatttcaatcgccccttcaaaacgatcttgagcgggtctgatctgtgacggtccctgcataactgtgatccggcgactgccgcgtttgataatctcccttgcagctagtcttccaccttccctgccatccgcatacacggatggacgatccagtgaagttctgtccagaaacacgacgggaatcttcaggttttcatatattgaagaatgaggatagttcgttgaagagatcacaccgaccacattgttctggataaacgtctggatgtaatcctgctccttccgttcatcctcatcactatttccaaatatcagtctgtaatcctgctcctgcatccggtcctctacgccgcgggccaactgcgggaaataagggttcgtaatatccggcaacaacaggccgatcagtttggacttgcgcttatataatgagcgggccacttcatttggcgaaaaattaagcgccttcacagcatcttccactttcttgcgtgtgtcggcatgaacataacctctatcattaatgactctggatacggtggcaacagatacgccagccagttgagctacatctttaattgttgtcataagttgctctcctctatgtgtaaccggttacagacattaaattatcatattattttcaatttgacaagcgttttcattctggaaatttctccaagtatacataaagtgcactggaatccatctatatcatggttttctcctgtcagggagatcgatacttcatagacgtaaagaggccatcactcgattaaaactcagagtgatggcacccagatcaacataaaatcagcaagctcctgaacttaattagcctttaatttaacaaattagatagtaccattttcgaataaatcaattcatagcgtttatttttataactccccataaacttcatctgtaacaggttccaaccattctggtgtacccgaagtgattgcaatgtgttcaaaccaactatctttagcggccccatgccagtgttttacaccatcatgagtcacaataacatcgccggctttgaggaattgggcaggttttccttcttcctgataccaaccttccccaccagtcactaacaacagctgaaatccaccacgatggatatgccagttatttctgcatcccggttcaaacgttacattcccaacacccacattcactttgggatcagcaaccaaggattggagataactttgccctatgaaatattgcgaaaatgcttcgtttttttctcctaccgggaatatcactccatctttaacttcttcatgtttagccattttatttcctccagtgtgatcttattgattaatcgtcctgctcctatgttgacctaaaattgatttcacatatacgtgcgatatcgcacatttgtgtataatataaaataattgcactgcctctgcaaggatcaaatgaacccgatctgtgccttatggcgcaaaggaacaacatttgtgcaattactctctggaaagaatggtgattactatcgtttctatcacagatcgaagaatacttaagtctcaggaagcgatcaaatccgcctttatcaaactcatgaacgagaaaccttttgataccattacgatgcaagatatctctgattatgcaaatgtcggccgcagaacgatataccatcactattcggacaaatttgacttgctggataaattaattgaagaacatatcgatgaactacgaagattgtgcaaggaagcatccgatctggattttatagaaagcaatgtactctggttcgattattttgaagttcactattcatttttctcggttatgttactgagtaaaggagccccttttttccgcaatcgcttcctggctctcgtcattgaagaactggaggatgaggtgaatgtgacggagggaaaaaataaaggactaacaaaagaagtgattctcacgttctttggtacagcaatcgttggtatcgtggaatcctatttcacgaatggattaccccggcaacctcacattgtcgcagaacaagtagggatgttactagaaaggaatctataacatagactcctcatgaagtgtcccttcttgatattcttatcagctgaagagcggtttattaattatcattacaaagattagcgatatgtgatatggtcagtgaggatattaatagattcatacatacatatgtacatgaaatgtgaggagaagatcgaaagtgatagagagaaatacccttgagaaaccgagtaaatttagtgatcccatttttgtcatgctcgtggcaagcctgtgttgcttgttatggggaagtgcgtacccatccatcaaacttggatatatcgcgtttaacattctgccggaagatattgcttccaagtatgtatttgcaggataccggtttacactggcgggtatgctgctcttgctcctgtctcgtatcgttagaaaacagaagctccaattaaccaagcctcagtggacaggcctcatcatgttaggtatattgcaaaccggtttgcaatatatgtttttctacgtcggcgtagccaatacgacgggtgtcaaaggctccattatgaacgcaactacaaccttttttagtgttgttctagcccattttatctataaaaacgacaaattaagcagaaataagatcgttggttgcttgctcggattcgttggtgtaatcatcgtaaacttccatacggatctgcttgctttttccttttcattcacaggcgaagggttcgttattatagcagcacttgttttttctgttacggccctttacgcaaaacgtctcaccgccaccatcgatgttctgatcataacaggtgtcagcttattcgtcgggggactggtacttacgctgttaggtctatcactcggcggtcgtgtcacccatttcaccctggaatccaccagtaacttaatctacctggctttgctgtcatccgttgcattttgtctatggaatatgcttctcaagtacaacaaggtcggaagagtgtctgtctataacttcctaatccctgtatttggagctttattatcagcgttattcctgggggaaacgattctagaactgaaaaatctggtcgcattactgttcgtgtcagtcggcatttatttagtcaatcgtgtacgttctgtgcaaagctctaataacactccaatgaaatagactacgcgtcccaattttttggataacaaaaaaagccgctaattagcggcttttcatataagttcgtatacgaatacgttcagttctcgctatgttataccttaatatatattcgtaaagtcaattaagtcatcttcttccaaataattaaaaactatagtgtgcttacccagctcatattccatctcataaccacccacaacttcattataatattccgaggtgggttttcccatccatcgtttcacattccatggtgagagatactgcttttcattgtacagctggataaccgcaatacgtgatttcttgctaagctcgtgcatgtatgaatcaaacccgataccgaatttagaataataatagtacgctccccattccccgtttgaacgagaattgggtttccccagctttttttgcgcattttgaagcgtcgtaccaatcttgatgtccgtccggcctggcaatacaccctttaaagcggcttccttcaggcttttcaggtaagcgcgatcgccaacacccgagttcggccaatctcttgaacgaaggttacgcgtatcttccaaccgcatttccaatttattcacattcaacttaaatgtatcgaattcatagacaaaatgaacattgttgtaatttttaaattgtactcgagcacctgaaagagtacgtatcccaccatccctgatggcgtagaacgagtctcccatttttttcccattgttctctacatacgttacacgacgcagttcaccggaacgaacaatatacgttttgacttcattcatatttgaagttccccaatcggtgatcatcagcatgtctggtgtactagcctctttactcttcacaacaaagttccaggtttgaggcaaaataatcgtattcagatccagttttgctgcctgaacagttccgtatgctgcaccttttttaagcaaggctgcacgatacgtgcctgaataactcttgtcgccttttttattgttggtccaaccattttcttcggttagcgttctcttctgttcatcataagcgaaaatataaacggtgtaagccgtttgcttggcatcacgaagcgtaaatgaaagccggctcatactttcgagctgtttggcggagatttgctctcctttggcagcagcattgggtggtagaaggagcaatgcgctcagaacgtagacgaataaggtaagtaaggccagagaagcccattttgattggtgcttagggtgtatcatcgatgactctcctttgagtaaaaaaataaaaatctaacagctcttttctaattatgaatcattcacaatctcaacattcaaacaggtacttgctagcgtgtaatcttgatcaaactatgtaattaatttaggttcatgttcaataagcatatcctcctactagtactattttcctaagaatgataacataccctttctaataaagaaataacaatctaattaatagatttcgaatcatataacataaaaaagccgctatttagcggctcttcaagtaacttcgaatacgatatgatttatagacaggagtaaaccacattacgtaagcgtcgttgaacgtatggttcctgactgttaagcaggtgctgtgcatacatgactgtaagctctgaatccggatcaataatagccatacaaccagcagcgccgctccatccaaattcgccaattggactcagtgagccgcttcctgctttggagatatgtgtgcgaacacccagtccatagccgtatccatacatatgatcccaggaataatcagcacgagtcatctcgttcaggtggtccgttcgcatcagttccactgaagcttgtgacagaatgcgcacgccttcgggactcgtaccatgcccagtaagcgcgttcagaaaacgtgcataatcgctaacggttgatagcaaccctgcaccgccgctttccagctccgtacccacacggaatccattgccgtcaaaacgtacagccttttcaagctcaccattataagcatactgtggaatcaggcgcttctgctgctcatcgttcagattaaatgctgtatcgttcatgccaaggggtccggtgatttcgtcccgcagatacgtaccaaagcgtttgccacttaccacttccaccaaggctcctaacacatcatggcacatgctgtaattccagtgtgtccctggttcaaacagcagtggttccttcgcaagcgctctcgcgaagtcacgtgttggcaatgttccgtcggtgctttttacagcttcttgaatgctcggactacccacgtcatacgagaacccggcagtcatggtgaacaaatcacgtactgtaatggctcttgtcgccttttccagccggatctccccgttcagcatcgttttctttaccgtcatctcagcatactctggcagataatcagacaagggatcacttaacagcattgcccctttctccaccagttgcagccctgccacgcaggtcatgattttggtcatggagtatagattgaagatcgctccatcaccgataggtgttttctcttccagattggcgtatccattacgataatggaaaacggtatcatttcgatgcatcaccagcacctctgcccacggtacacgccaggatgtaatgcggtcaataaatgaagcaagcggtttaaagtccattttttcccgtccttctatgtaaaatcgtttatcattttgcgatgtggtacatgttcactcccacaatcgacatattattaatatacgaccttttacaaggattgaccaccacctatatggcctcaaccatccatttattgaccgccgaatttgtattacatttcgttcatgatttggaaggcagtatgagataacgttaatcagaaacagtttgaactcctcaatgtctgacatccaatcaacatcgatattcaattatgcaaaaaagccgctatgttagcggcttacaatgagttcgtttcacagctcggaaccgtatgaagtatcgctactactgtacttctgctcttgccgtggagacaaaggtcatcaattcttctacgggtgtgcgaggacgaggtttgggaaccttgtttgtatcaaaataccccagatgaagtgtgccaacaattctctcccctggtctcacaccggtcttgaagtagaaatcaggatcgaaattatattcatttgtcttccacactacgccgatatcctgctcccatgccaggagttgaatattttgaataagggcagcactagcccccacagcatcttcccatacccgttgtctcggatcagcctcaatcacaaccagcagatgggcttggatagattcgcaatagtccttttgcagcttctctgtccagcgctcccgctcatctttggaaaacgtatgtagcaccgcatcagcaaattgcttccgaccttcttctacaaataatatgaagcgccatggctctttacgggaatgaacaggtgcccacacggccgcttccagcaagtgcatgatcgtttctttcgccagcggtttgccattgaactgacgaatggttcttcgttcacgaataaccttttccattacagacgtttccatatgcattaatcctcctgtctagtttccttatttattgggtaaggaaatttaccgcttcgtcgataatcttggtctgtccgatgggtcctccgggaccctggaaccacaaaccgtagtcaacgatgtagacattgttgtttttaacagcattcaggctcttccacactgctgttttttgcaattctgtcgtttcattctcgtctgatgacaacaggaaaatatgatccgggttaatcgatggtaacgactccatggagattactttcattgaatctgtcgggtcaggtatggatacaggaggtgtcaagcctagatcgtcgtacagaacctcgtagtttcttttactgtaataacgcacttctttatcggataaacgcaggaacatcacggtctcgtctccgatggattgcttgattttctcacgggcttctgcagccttcttttcgtattcttcaatgacctgtttggcctgatccgtcttccctaacatatctcccatatgtaacaggcttgtcttcatacgaataataccttgctcgtcctgcagcttctctgccagcaaggtaggcgcaattttgctgaggctgtcataggcgtcactcatgaaatcctgtccgataatcaggtctggctctgccgccaatatgctttcgtagttgggatcaacctgccagcccagattttcttttccttgtagttgatcggacaggtaggtaggaaactgatcactcccctcctcattactggatgctgcctggggtacaataccgagtgctaacaaatagtcagttgcagccgggaacaacgaaataatatgctgaggatcacctttgatgacagtttctccccaaggatgtttaacaacacgctcctgtactgctgattcggtggattgcgcgacttcggtggttggagcattgttaccgcttgttccattactgcttgttgccggactgccctgagaaggggaacaggctgatattaataatgtaaggctgagcatcaaaagcaatgcaacgggttttctcgatctcatagatgtaagtgattctccttttgagttgtattgataataattatcatcatcaataggatcataaccgcgatgcataggactgacaatggacaattctgattcatggatagcattattctgaccggttggcagggcgatacatttttgtttgaaccgacctggtgaaaggccaacatactttttaaataaacgattaaaatagatcacatccggaatgccgattgcctcggcaatcttctgaagagatgcatctgtgtgcaacagcagctccttggctttgtaaatccgtatccgagttaaataggtaatcagactgctgcctgtctctttcttgaacgttctcgacagatgccctgcactgcaatccagaagttctgcgagcggatcgaccataacgggcaacatgtagttctcttgaagataacgaacggcttgagctaccagatcgggcttggcagtctcaattccttttgcacttaactgcctcattaattcattaataaattgataaaataacgtctttacctgaaatttcgagaacgcatccgtccgttcccaatgttgctctattctttggactttatcatataagtcaatgggatagcttggggcgaaagcatattgcacatgaaacgggacatgttgcctgagcagagcttgattctcacgagtattggataacgacaaattagcgcgataaaacatcaaataaaattcgaatgaatcctcgttcagggagatattcatccatacccccttgcctccatgtaagacttgcatctgatcgatcgcgtacatcgtgtcatccagcgtaatcgttgcattgccgcgaactgtatatataaaaccgctaattggaaatcgataggcatggatgggttcgccagcgcgcacgacgacgtgacgcacatcccatattttaattgaggccagattccataacttcacatgctcttctacgtgcatctcttccttcaccttccacaacccattaagttagcaaaacatcagcaaaatcagcggatattttcacttttctccattctatcgataatcattctcaactacaacatatatcttcctattcgataaaatgctacgcacgaataagccgatccatgaaaggatcggcttatgttgtaacgttttagacttcgccgcgtctgttctcaaccgatttcatacggttttggtcatctggcactcggtcaacactgaactcttgaccagcttcaacctcaccatgacctgaaatatttcgggaaaaattagtgaactgtcttttttgatcatccagttcatgtttttgcttcaaaagctcttgcgggtcctgctttgtcactatgctaacctcccatacatacttgaagtcatgcaatttaattcgtactacagaagttttccataagagagctgtacttatgcatgaatatagatgagatggatatcgttccgttgttagtacagctaatttatccagttaagagactagtttcaatcccacaatactgacgataatcccactaacgatagccaatttctttgcatttttgggctctttgaatacatacatccctaatagtacactgcccgatgccccaatacctgtccagattccataaccaatgctgattggtatctctctcaaagacagggaaagaaaaatgaaacttaatcccagaaacatagcgaacatcaatgtatgtttcaatttggtaaatccatctgaaagtttcagaaatattacaccgccaacttcaaataaaccagctaagatcaagaaaaaccaactcatattctatacacctgcctttggtttaggttcattggatacaaatttcagaccgatgatgcaactgattaatatcatgaccagcacgattttgattgcacttacggagtcccccaaaaaaatcattcccacaattgcggttccaaatgaaccaagtccggtaaacaccgcataagccgttgatacaggaagtactttagtggattttgcaaagaagtagaagctgccaatcattaaaataaccgtggggattacgatctcgattttcgaaaaaccatcggagaatgacaaacctaatgcccaacctacctctaaaatccctccaagaataaggaataaccacgccataaaacattctcctcttctgcattcatgttgttgttttgtaatcaacattcacattcaataatgatagtattttgtatcatttgatataataataaaccatctttattttatttgcaaatttaaatattcgtatcaaactaataagaaaatccgcctgttaaaactccaagttacgctgtggacatacaaaaaaagccaaccagaagttcctggttgaccaactacgtataagttaattttgtttttcggaatcagtgaatatctttctttttgaaattgccgcctctcacttcagctacatcgtatacgactacaaaagcagttgggtcaatttcgtgaatgatatctttaattttactctcttccatccggttaatgacacaagtaatttccttgaattgctcattagagtagccaccgtaagcctcggtatacgttgctccacggcctaaacggtcccgaatggtttcaaccataatctcaggttgattcgtaataattttaaacgttttggagccgctcaagccctcttcaacaatatgtattactttagaagcaataaaatacgcaagtcctgacaagatcgcgccttgcagaccaaacacggtagaaacgacaataaatacaaacatgttgaggaacaggatgagatcactggttccaaaaggtacttttcgcgaaaggagtacagccagcatatctatgccatccaatgccccgccattacgtaatgcaagtcccataccaaaaccgatgataatcccgccgacaaccgtaacaagtaaggtatcaccttcaatgatggttggtatatggtgcatcaggctggtgctgattgcgagtgaagcaataccgatgatcgaatataacgcaaagctttttccgatttgcttgtacccgagccacacaaatggaatgttaataatcccgatgagcatccccagtggtaatccgaacagctgtgatcctacgatactcagacctgtgacaccaccatctgagacattattcgggatcaatatggcttcgaggccatatgccgttataaatcccccaatgataatcaataatactttggagaggatctttaacttgtttgacttttgttttctgttttgatgcattgcatttcccccttgatgaacaaccgataaaaaacagtctataataaaaatcactgttttggcaatagatcgtcatttgtgtgtgttagttcattgtccgatgagcgttcgatacgacgaaattttatgctcaagcatctcatctgctgtgttaagtatgtgcatctgtttttgaatcgactctttatgctcctccagcagctttaaacgatccgccgccgtatgctccccttcctgaaacaaggacgcatatttcttaataatagcaatgggcatttgagtctcttttaatttgatcacaaattgcagccacttcaggtgtgactcgttgtatcgcctgtctccactggcatctcggagaggagttataatctgttccttctcataataacgcaacgtatgtgcactgatatggagtaattctgccacttcaccaatggtatgcatggttaacctccctccattttcccgcttgacttagagtaagctctaatcagtataatcaactcgtggtcacatcacaataaaaaatgaaatcagatccaggaggaattcccatgaaatatacagtgattaccggtgccagttcaggcattggatatgaagcggctttagcttttgcagctcgtgacaaaaatataattctggcagcacgcagaaccgatgaattggacaagttaaaagcaaaagtagctgaaatcaatcctgctctggatgttgtcattcgtacagtggatttgtccattgccgctaatgtgcatgaattctatgagagtcttcacgcttactccattgagacgtggattaacaacgccggattcggaaattttgcttccgtgggcgaacaacatctgcccaagattgaacagatgcttcatctaaatatagaagctcttacgattctttcttccctgtatgtacgtgattatggagatgttgatggcacacagatcattaatatctcctctggtggtggatatacgattgtagccgatgcagtaacctactgcgcaaccaagttctatgtaagtgcctttaccgaaggacttgcgcaagagttaaaaggtaagaacgcagcgatgcaagccaaagttctcgcacctgctgcaaccgagacagaatttgcgaaacattcctttaatgtagatgagtttgaatatgaaggcagggttcccaagttccatacggcggaacaaatggctggatttttgctggagttgtatgacagtgaaagtgtagtcggcattgtggatgggttgacatatgactttgaactaagagaaccgatctttccatacgctgcacgagcagcttcgaaaccgaaaaattaacccgaaaactgaagtcgaagctaagtcggctcaataccggtaaacattcacctaacctcactgataaacatcattgaatctaatcgttaaacttcagttaacgttaaaaagggaacctgtctccaggttcccttctttgtatttattttaaattctatattaatacttactatataatgaagtaattatgccagcctcattttgaaatcctgatatccgaattcgcgaacaacttcgcaatcgccgtcttttcttttgattgcaatcgctggaagcggcatgccgttgaacgtattggttttcaccatggagtaaatcgccatgtcctcgaataccagacggtcgccttcttgcaaaggctgatcgaatgaatagtccccaattacgtcaccagacagacaggtttgtccaccaagacgatacagatgggctttctcgcctacttctcccgaaccgatcagcggcggacgatatggcatttccagcacatccggcatatgacacgtagctgaagtatccagaatagcgatgtccataccgttcttatggaagtccagcacagaggtcaccagataacccgcgttcagcgcaacagcttctcccggctccagatatacttccaggccataatcgttctgcatacgcttgatgcatgcttccagtcttggaatatcataatcttcacgtgtgatatggtgcccaccaccgaagttgatccattccatctgcggcaaccattgtccgaacttctcgaccactgcattcagcgtagtctccagatcgtcggagttttgctgacacagtgtgtggaagtgcagtccggagacgccttccaacaggtctgcatcgaaatcctccagtttcgcgccaaaacgcgaacccggagaacacggatcgtagatctcatgtccttcttgggtagagcattcagggttgacgcgcaagccgaccttacggccagcttgaagcgccttatccttgaattttgcaagctgcgaaaatgagttgaaaataatgtggtcgcagatggagataatctcgtcgatctcttctgcgcggtatgctggagcaaagacatgattctctttgcccatttcctcatggcccagacgcgcttcatacaaaccgcttgccgttgcaccgctcaggtattctccaatcagcggatacatcgcagtcatagagaatgctttttgagccagcacgattttggcacctgtacgctgcataacaccgttcaggattttcaggtttttctcaataagcgcctcgtcaacaacaaaacatggtgtcggtaattgctcgaaccgcattttagcgaacaagctccgattctttaacttcttctggcagctcatcaacgagtaccgggttgaagtcttctacccatgggaggccccatttgttcaactcttccatgaatggatctgggttgaactcttctacattatatacgcctggtttgttccatttgcctgtcatgaccattgctgcaccaatcattgctggaacgcctgttgtgtaagagatcgcttgggaacccacttctttataacactcttggtgatcacagatattgtaaacataatatgttttgtctttgccgtcttttttacctttgaaaatacaaccgatgtttgttttacctacagtacgtggtccaagggatgctggatcaggcagtactgctttcaggaattgcagtggaataatttgtttaccttcatattcaataggctcgattgaagtcatgcctacattttcaagagctttcaagtgagtcaggtagctttgaccaaatgtcatgaagaaacggatacgtttcagacctggcatgttttttgccaaagattccagttcctcatgatacaacaggtacatgtctttctcgccaacttctttgaagtcgtagacacgtttgatttccattggttttgtttcgatccattcaccattttcccagtatcttccgttcgcagatacttcgcgaatgttaatctctgggttgaagttggttgcgaacggatagccgtggtcgccgccattgcagtccagaatatcaatgtactcaatttcgtcgaagtagtgcttcagggcataagcggagaatacgccagtcacgcctggatcaaatccactaccgagcaatgcagtaatgcctgcttgttcaaaacgctctttgtaatcccattgccagctgtattcaaacttcgctgtatcatgtggctcatagttagctgtgtccatgtaatttgttttagttgcaaggcaagcatccatgattgtcagatcttgatatggcaaagcaaggttcataacgatatcaggtttaacttcgttgatcaaagcgatcagttcgtcaacattgtcagcatcaacttgtgctgttgtaatttttgtttttccaccgtccagcttggctttgagttcatcacatttggattttgtacgactcgcgatgcagatttcctcaaaaacttcgctgttttgaacgcatttgtgtactgccacggaagcaacgccgccggcgccgatgattagtgcttttcccattttacattctcctatcccaatatgtattttttttaattggtttaatacggtgacaacaagacaacaaaaaaagcaaggtgaaaaatgctcgcaatcgcgcatcatcacacttgcttatcgatatacatcataaaaagacgtgaagtctccatgaccaaaaaagttcacaagaactccttggcggaaagctccttcatgtatatcaatattggatcagagtctatatagcaaataattcgcctttaccactcttattgaccgtttcacaagttgatgtgcaattgcactggttgtaaagtaaccaacttataaaatttgagctttgaactcaatcaataaagcaacgtaagttgccaatcggcgtttgacccggctgtccgtatggccttaacttcctggtgaagtggtcaaaattatctgctggaaagctctaattcatattgataaataaacttcccaaaatcacaggtcttacactatcagacgttgaaaaaaaaatcaagcaattatttaaaaaaaatttgtccggatgatgactaggcatgaaattgatatccttcgaatacttttaacccttctgcattaagtaattccccagttacttcaggcttttgaggacttttctcaaatactgcgagcttgcagagcaatctcaatgactttatgcataaataattcatctttattcataaggtttacctccacaacaaaattatgtactcaaatataactttgcttttaagcattgatcaatgtcacagccagcctctgttcattccattctatcatcattacaaataaagagtatgacgaaaattcgctatactccagtgagccatactatgttcatctattaaaattttaccggcaatgatgccaatccctcagataatagtgagtagtgccaatgaatttcttcgggaggaacactaagctgaagaccgggaagtcgacttaatagcgtagtaaatgctacgtctccctcaacccgggccagtggagcgccaagacacatatgaatgccgtgtccaaaggccaaatgccgttttattttgcgttcaagatccagttcttcaggttggtcaaactgtaactcatcccgattggctgatttcaaaagaggaatcacaacatctcctttttggatcggttgaccatctagttctgtgtcctgcgttgcataacgagggcctgaagaagtcgcgggcccgttgaatcgtaacagctcctcaaccgcagaaggaaccagatttaaattttgtttaagttgttccagttgttcgggatgtgtcagaagaagataagagccggttgcaatcagattggaagttgtctcatgtccagcaaatattaataatgtgatcatggatattaattcatcttcattcagtcgatcaccctcctcctcaatcgcaattaattgactgatgaggtcatctgaaggttccactcgtttgttcgccacaagctgagccgtgtattctgcgaatgatcgcaaatgctgctctacttcagggtcttgtttaccgaaaccaagacctttggcaatggcttcagaccatacatggatctgaggtcggtcttcctgaggtacaccgagcatttcggatatgacattaattgggaaagggtaggcatagtcttttacaagatccatctctcccttcccttcaacctggttaatcaattcatcggcgatttcctggacgcgtggacgcaggctttccatatatcttggggtgaacgctttggaaaccaggctacgtagtcgccggtgatccggttcatcaacaaagagcatcgactttccggtaaaaaaggtctggggttccgatgaatccagctcgcctgaaagattctttctaatatcattgtcactatcaatagagttcatatctaccgtaaatcgggagtgatcttttaacacttccatggctacatccattcgagttataatccaggtttgctctgatccacccattggattgggaacaggaacaacggagcctctggatcgcatctgttcaaagatggcaaattgatctttaacattttcttcactaaacaaattgaactctgatttttccgatgtttggttattattcattgaaatcttcctttcgtagtgaagttattaaaatctatggaaatatatgttcattttcattatatactattcgtatatttaatttcaaaccaaagagttagttcgacaaaaatcactatcattacaactttttatgtatatacgataagtataataacagtcattttgaaaataaaaaagaggtcggcttttggccaacctccaaattaattacggtgcttcaccagttccaaataccaccaacaggcttcggtcagtctattggcttcagattgaaacgcgctggatttgtactctttgtgaaacgcttgaagcaccacttcgattacaggaatatttaaatcctcttgatcttgtaatagcgctaaaagccccttcgaaagttgcttgaatgatgcagattccttggatttttgtacacggttgttgaactcatccaattcgatcaatatattatcgatgtccagacccatatcatggttacgctcatcggcattcaggaaatagagagactgaaagtcgaaaatatgttcatttctctgatgcattgttcttaggatcacttcaatgtacgttaatactttgggaaccacttcgctccataccggtttttgcgtatttagacttcttgatgtgttggcaatctgatgtaatatgccgtagcacaatatggccccttcgttggcatataagctaatatcgttcccgtaaacctgaatcaagcgtgtggacagccattttaggtgaactgtagccagtttggctgagttgatctccccggaataaaaacccgtccaatataattcccatactcgctctttattaggtacagacataggaatcgcaatctgatctacgagcaggtcataatccgatgtatagtgattttgttcaagctctttacgaatgaaaacatcctcttgcatacgctgatcaataatagaatataaacagtcttcctttgaactgaagaatttgtagaatgtgcctttggatacacccgattgatccaagatcatctggattgttgtatttgcatagctgtgctctaaaaatagtgcaagtgctgtttccaataaactttgtttacgactactcatatctcgttatcgccccaagtttttctattgattttaacattcattcctcaggagttgaagcattgattcgcagtatagctgtcatataaaataattgcacaatgagtaaatttgcacaatgggcaacttgtttgttatgataaacctcacaaagtgcatattaagtaagtgtgctcttcttaaaagaattaaaccatagtcattggtgttggaggtgaacgcataagcggagaataatgatcaaacgaaacttgcgacatttgaagaaagaagcaactgaaaaagcacttgctagtgctgcatttgaacttacccttgaacatgggcttgatggctttacggtcgaagatatcgtgcatcaggtgggttgttcccgcagaacatttgcaaactacttcacatgtaaggaagaggcagtagccagaggcgcaatatccgttcagaatacaacggaactcgaagagttgcttaccgaattgcccgacaacgtctccttgcttgacgtactgtataacctgatcaagatgcagcttacaacagaactaataggaagacttcatcagctactatcgctatcccagacctatcccgtgcttgaaccgcattaccttggagccatgcaccggatgcagacgcaggcacaagataccttattagacttatctaacgggaagtatgacgagatctatacttatcttttgatcaacgcactatatggaacaatactgccattaattgatggaagactcaatgtgttactgcccggacaagtcattactgaagataccaagcccggtgttttaacattcgatcaatttttggaaaccacgtttaatcatttacgggcaggatttgaacatgccaaccatccacattcatcatagaggagtgtaaaatagagaaatgtctacattattatacagagtggggaaaaccgcttttagcaaacctgcctatttcatcattggctgggttttaattctgggaattgtcatctccatgatcagcatcaatggtattcacatcagttccgaaatgaagattgaaggcacagagtcacagaaggttctggatcaattggcaaaagaactgcctgccgcctccggcggtcaaggaagtgttgtcttcaaagctccagacaacgagcgtttggatacgcctgaacgtttggccgccatgatgaaaggtgttaatgaagtttacggattagacaaagtcattaaccctgcggactatgcagctgaagcgggtaattcgggtgctcaggcggaaatggctcagaatgctcaggctactgatatggcgcaatccgcaacaaccacgcctcctccctatggacctttgatggtggatggtgttcctgtacctggaatgctgatctcttcagacggcagcattgcactgttccagttccaatttacaattgaacagtctgccataacacaggatgtatttgattccgttattcagtccgttatgacggtagagcaaggaaccaatattaaggtgctgccgggcgaaacgctcaaaacggtatcgattggagtcggctcggcagagattgtcggactggtcattgctatcattgtattgctgatcacccttggctccgttgttgcagcaggtctacctctgatcactgcactcctcggtgttgccattggagttggtggtgcgttctccatctccaaattcattgaaatgcctagtgtcacttccgttctagctctcatggttggattggctgttggaatcgactatgcgctcttcattgttaatcgccagcgtcgaatgatcattgatcaaggcttgagcgcaaaagaagcaacggccagagccattggtacatcgggcagcgcagtattttttgccggattaaccgtcattattgcactgtgcggtatgcttgtcatcggtctcacattcttgtctacgatggctttggtcgcagctgccaccgtgctcatcaacgtatttgttgctttaaccctgttgccggctttactgggattggtaggagaacgcatctgttccgccaaagctcgtgagaaaagcgcgaaacatcctaaagccactaaccacggagtcgcgaacagatgggtgaaattcgttatcaaaaatcgttgggctaccattatcgccatcatcgtcattcttggttttgccgcgacgccgatcaccaaaatggaaatgggtatccccggcgcttcctcagcgaatctggatacaactgcaagacaaagttatgatgccatctccgaaggcttcggagaaggattcaacggaccccttattctggtcgcagagcctaatcagtcttccgcaaaagttacaccggaactcttgggtggtctggtgatggaacttcaaggtcagaataacgttgcacaagtcacaccgcttgggatgacagaagatttagctattttcagtctcattccaaaaacgggtcctaacgataatctcactaaaacactggtcactgatctgcgctcggctgattccggcatcgcacagacctatgatgtgaaactcggagttactggactcacagctgttaacatcgatatgtctgccaaactggcgcaggtgttccctatttatgtaggcatcatcatcctgctctcgctgataatcctgttacttgtattccgttcgatcatcgttcccatcaaagccaccatcggcttcctgcttagtatcctggctacattcgggatcaccactgctgtattccaatggggctggctgcattcgctctttggtttcgataccggcggcccgctgctgagctttatgccgataatcgtaacaggtatcctgtatggcctggcgatggactatcaagtcttccttgtgagctccatgcgggaatcctatgtgcatggtcatcgcgggaccgaatccgtcgttcatgggtacaatcaggtaagtcgcgtggttgttgccgcagcagtgattatggtctctgtatttgcaggatttatattcactgacgatgtcatgatcaagcagattggtttcactttggcggtaggcattctgattgatgctttcatcatccgtatgggcttggtccctgccatcatggctattttcggagacaaagcttgggcacttccaaaatggctggatcgcattctaccaaacctggatgttgaaggcgagaagctgattgcttccctgaatgctgaagagcatgccaacacgaagtctggattaaaataatcctgccaatagaacggtagataccatgattactattacgactatattcaccgatacaaagacctcctctgtttttataaacaggaggtcttttttctttttcacattttatgcggtgatgtcttcaatatggatagtatagcgtggggatttagcagcattaacaaacgccgcaaataacttctgactgtagtcatctactttatagctgtactctggatgccactgcacagccaaaacaaacgagcggtttggcatgaccacggattcaacgagtccatcttcagcgacggccacagcagttaacttatccgataacattttgattccctgatggtggtagctgttcacttttaccgtatcggtttgcaaaatatcgtataggatattatttttctcaatatgtacatcatgtacaagatccgtatacggcggactttgcttatgattaacgatcttgttcccatgaagttgaaggctagtgggaatgtcttgatataacgttccacccaacataacgttaaatagctgcagtccacggcatatgccaaaggcaggtttatcaagctcaattaccttttgtaataatatcgactccatcatatcgcgttcaatacacaactctccacaggtaacctctgcatgctcatgatacagctcaggattgagatcatgtcccccggtgaacaggaacccatcgaactgattagccagcgttgctatgatctcgatatccgttgtcaaaggtagcataagtggaatcccacctgctccttctatggcgttcatataatctggaagcatccagtaactttttttgtctgtatcatacaaaggcagaacaccgatcatcggctttttcatggcattacctccaagcttttcattcattttatcagatctcttcatatataaattcactgaattattgcattatcctacctctatcatctacgaacccgttacatccggaatgctggaaaactaaaaaaacaaacaaagccgtataacagcgactttgtttgtagttcatataccatatatatgcattcatccgtttagtttagacagcatctcatctaagctgcttttacaggggttgcttcgtctgaattcaattggatggaacgctggcatatcagggttatgacaaaagccagcaaggcaagcatcacagcaactggaggcacccaatgaacaccacccatattaacggcaattcccccgacaccagagcctagcgctatacctacattggccgccacaggcaggagcgtagatgcaaatgctttggaccccggcgcgatcgatcccgacacatcaaacaaatataactgggatgccgcgctcatcgaggatgacagacatccaatcaggaacaggaatgccaagccgagccacacattagaaacggtaaaactcatgccaaggaacaggatggcttggatgacgaaaagccgcttgagcttgggcaggaagtcacccctggctattttggcaccaatccagttactcaggatgctgcaggcgccatagatcaggagtatggcactaatccagtgtactggcacacccatcgtctcactcaggagtggcgtaatgtacgtaaaaacgacgaaaatacagctgtttcccagtacagggatcagacatgccagcaatatccgtggttttaaaaagagagacatctgatcactgaacgaacctgcaatcgttgttgtttggcgtggcagaatacggaacatgaacaccagcggcacaacacctatgcatgccgtaacaacaaacgtcatggaccaactcagatgttgtccgataaaagtaccgagcggaacacctagcacattagcgattgaaaatccgcccagaatccaggcgatagcttcccctcttcgctcccggttcactgcgtcgcttacgatcgagatcgaaagtgatatcgtaagtccacaagcaacggccgacacgatgcgaatggccatcagagaagagaacgttgttgagaacacggtcaatagatttaatgctaatacgattgcaaatccaatcaatatggaacttcttctggatattttggccaagaaagccacagcaaatggagtacccaccgcgtatgcaatcgcaaaaccggagacaagcatacctgcggcagcaagtgatactttcatgtaactttcaatttccttcaacacacccacgataacatactcggttgtccccagtacaaagctaacaagcgtaagcgttaaaataagtaggttctctctatttctagtcataaatcaatactcactaatcctttctattgttgcaagcgcttcaattctgtctacaatcattaattgatgtattttctgctttcccatcccttcactttcgatatatagtacattttggatagtgaaattgtactgtcagatataccatgccgacaatcaaggttgttgtggttttattgcaaaacattatatatgttgtcatttcaacacagactttcattactgatcctgaagggaagacatagatgaatacacaccacgaatccggccaacggcatccaaatcgagattgcaccattatttatgtaggaaaactggccgacaatccccattggagttttccgacgcataaacatgacgatctgcatgagattatctacgtaactgaaggcaaaggattgttcaccattgacggcaccaaacactgggcccaaaaaggggacatgctcatttataacaagggtactcttcacgaggagaagtccaatcctgaattcccgttatccaccttttattgcggctttcgttttacagaaggcacccagacccttgaggattgggtcatccctccctctaacaatccgatcattcgagccaaccgatattccgatgagctccattcgttaatgcagactctcttcaatgaattttcaatccgggaacatggatacgagtcgatctctgggcatgtcctgaaagcaatacttctgatcatcgatcggcagtcccgtcaacagcttcctagtggggagatcgttgagagcaatacccttgctgagagcattaaagactatttggataccaactatcggcagaacattaaactcaaagaattggcagatcaatttcatatcgatttttattacttaattcatatgtataaaaatcactatggcacttctccttatcattacctgattcaacgaagaatgggtgaagccacccgattattagtctcaaccaacaaaaaaatatgggaaattgccaaactggtcggttacgataaccccaattactttacgattttatttaccaaaacggttggtgaatcaccacgaagtttccgaaaaaagaatcaaaaggatatgttcggggatgaggtgtcacattcttactaatcttactacatgcaaaaaggcgctccattgggggagcgcctggtgctttacatatctctttacatatttctttacacatttacttacttctactctagagcttaaagcggcgaaccaattcttgcatgttctcagctgttttggatagctgtgcagatgatgccgatatctcctgcatcgccgctatttgttcttgggctgctgctgaagttgtctgagcactatcagccgacactttagagatatgactcatcgcggcaacggtagccgagacttcttccgtactggctgacaactgttctgagacagcggaaatatcctgaatttgatccacgatatgcgttgtatattgttcaatgttcgatatggttgcagaagcttcttggctgatccgcattccttcaccgacttgattacgaactttatcattcataagagacgtggatttggcaatcagatcaagcattttaccaatggtagcaccaatctcgtccgcactttgtttggattgcatcgataacgttcgtacctcgcctgcaacgacagcaaaacctttgccgtgttctcctgctcttgatgcttcaatagaggcattcagtgatagaagattggtttgccgagagatatccgcaatcgcttcattcattcgattggcttcggcggagagactggatagctcattaatcaatgccgaggtttcttcaacagctccgagaatatgttccatttgttctccgacctggtttatcgttttcccaccattagcaacagcgcgctccgtctcttcagccgaatccacaatcgcgctcgcagattctgcaattgaactgatgcctctcgccatctcttctacggcattcgcggtttgttccgaattctccgccccaacgatagctgattccgcagtctgttgcatggtttcagccacatgttgaaccgattgggtggtttgctctgtactttcctgaatcatctgggaagagtgacttaacaacgatgatgtctgatgaagttcagcaaccaccgattgaagggaactggtcatttgatcaaaatcatttgccaatataccaaattcgttttcggttttcagattcactcgttcagacagattcccttcgcttacgctgcgggtggcctttcgcagtttttgcataggtacaataaaagatctcagaatgaagaaaataattacaccggcaatcaatacagatataacaatgaccgttagactcgatatcatgatgggtttcgctgcggcgataaaatcttcatggcccatcaaagcaatgacattccaacccgttaaagcattaacaccgttatatacctccagatcatacgccagatccgttctgacaaattgagaaaatgccatcggctcatcggaacttgaagccgtatttggatgaactggaattccctcgatgagcgccccgccgagttctcctcccccaccttttacaatggcaccagaccaagctgcgatggttcgattggagtcaaccacaatcaggctcccattacctcctacatccacataagatatttcttttgctaatcgctccagatcaagtttaatacttgctacaccttgttgatttgaaagagcctttgaaatttctacataaatcttcccggataccggatctgtcataatactcgaaaaaaagagtgatccattgttactcataccattggtgtaccatgttgtgctgcgtggatcatatgttacatcttctattgctggagatgatataacaccaccttggtcgctgcccacagtgatggcaagaagatcaggatatgtatcagctaattggtcgattcctacttgtactgtttcgttgttcgcctgactgggagtggagccatacatactgtctatataactcaataatgctgctttttcccctatcagattgttaatatgctgtcctgtcatggttaaaatggtattgatgggatctgtcattttttgttgtacctgatctttggcactattatacgaaaagtatccgataagtgcagtcgggatgataagtaccgcgaggaaagctgcaatgagtctagtgctcattaatcgtaaaccggctcctcctctcttataaaatgacctttttttcttttcctttttcaagttcaatcttcctctctttattcatttttggtagatctaatcggccagtaaacgcaaaaaaacccatatatatgcacacccaaagaaactttgagcatgtatatacataggtattgcctgaatgaattcagtaacaagccgtatttgtttagtattataacataaataaaaagggtttgttaactatgattgggtctttataccagacatctgttgtttataatccgtaggacttagccccgtatactctttgaacaccttcgagaaatagtgctggtcgctaaatgacagtacatcggaaacctccttaaacttcatgtcgggtagactttccatcagtctgcatgcctcctgaatgcgaagccgggtgtaatactggacaaacgtaatttgtgttgcatttttgatcactctgctgacgtacgacgggctaacgtgaaacttcatggcaatgtcgttgatagacaatggagagtatttatttagttttacgtaatcgtcaatctgttcgaacaggatcgctttactttttcgaacgtgggattgcagcatatcgaagcactgtcccgtccattccgtcatttcccggcaaaaatcggcataggactgtgcatgggcgaattgtcttgaccgaagctccagacccaatctcatgcctgacccctgttcctcgtacagatgagcaaacgtgtctacaatcaatccgataaaccgctccacctcggtcatatgtacattttcctctgcccatcgattcagcaattcagataacttaagagcaaaccgttctttctgccgagcctgtatcatctgtacaaaagcagattcctgcacgggatccagacagcctgtctcagatctggccatcgacaccggattcccggtatccaacactattccttgtttcaaccgttgctgctcagacaaaatggacgacatgcggtgatagagctccggcagattaccagactcagcgaatagaagttgtcctccaatgatcgcatcgatgtcatgcgcaaccaaatgccgtcgcaacgattcaagacattcatgtacggaagagtacacctcaagtgcactcttattaacaaaagcaacaaattgatatggggtttgactggtgtacacacgacaaggatggaatgtaaaaaaatcctgcactataccctcaagctccacctgtacccatcgttcatgccctgtggtaaaaggctgtttgctcataatgatcaacatctggctgaataaaggcggaaactcctccccctgtttcggcgtagtctcacattggggatgaatgatttcctgcaaatccagcagctccttggacatctgttgatcaagttggtcaattacccgacccatgacttcttcaagcgcctctcgctcgacaggttttaacaaatagtcaaacacttgcagattcaatgcttttcttgtgtattcaaaatcgctataaccgctaatcaagatgaccttcagatccgggttggcaattttggcttgctcaatcagggacagcccatccattttcggcattcgtatatcggtcaacagcagatcaatcggtgactgctttatcgccgccaaggcttcctctccatttgttgccgtagccgttacacgaatcgggaagctaagcgtctccaagagcattttaatattacgtaatatcggtttgctatcctcaacgatcataacgttatacatcgcctatgcctcctagttagtaaaaatccttcgtcagtgagccgatgatttgaatcgttgctccatgttgctcttccgcatgattgttaaatatattaataaaaagccggttgttatacattagtttgagtcgattgacactgttgataatccccatgttaccaagggctgtggcacgatcggcagtctggttcattccggaacccgatgcctgaatattggctaaaatctcctggatcttatccggtggaaagccctctccgttatctttgatctccaaagcccataatccgttatattgcttcacggtaatctggatacgccaaggcggcacggtgttggcaaaggcatgttcaatgcagttttccacaaacggctgaatgaccaaccgtggcaatcggatatcgttcgccagctcgtcagcacagatgtcccactccagatcctcttcgtacttttgttgtacaagggacagataatgtctcgtatgttgaagctcctcagccaaagtcacatgcgcgtatggtgaagagacaatataacgcagactgtccgaaagatgtttgcacatatccgatacaactttggtcttcccctcttgggcggcaatactgatcaggtatagaacattatgaataaaatgcggtgcaatctgggcttgcagcgccgaattacgcgcctttacttcttcatgaagcgccgatttttcccggtcaatggattgctgcaacctctccatcagatcctgaaaggcttcatttagcaataagagatcgttattcttcggcgtttcatccactttcagattcatattgctgtagttcatgcgccagatctgaccgcgtagcttgcggataggcagcagcaggttacgtgtcgacaagaagatatacacaaacgaaaccagcatcagtgctgtaatcagcagaatggacatcgtctgaaccgaatggatcgagcctagaacagattttttgggcgttatgatatacgtgatccagcctgtaatgggtgaagtggaatgcgtgatataattatcgtctttgtccacatccagtccctcgtctgatgcaggctttgtccaattggtaaatgtcacacccgcttccgaacctgtcatctgctcgccttgttcattcagaatatagacatcgccagcggtaatgccctccgttaggttctgtatataggcctgttccatctggatgctaagataaccgtacaccttgccgttctgatcattgatcgtgcgcacgaatgagatcgtatcgtcttgacgcagtagaacaaaaccactttccgtccaatctcgtccgacctgactactctccatcatggtgttcaggattgcgggaggattacccgaacccagatatgatgtcaggagaaccccgtgattgtcgtagatggacatgtccttgatattcatgctcggcccgatggcctgaaacatgatgtctttgatgatccgaatttgcttcagtctttcatagttactatgagctgaggagctcttgtccatggctacaaatatatttttgctggataatattcgctgcgacatctggttctgttgttctacgtatagatcaacttgctctcttaccttcgtagctgtaacgagcgtatcctgctctgttttcagtttgagcgggcggacaacgatcacatttacatacacgataaaacagcccagcacaaacaaaagcagagccagaaatgtcaaaaacacctttgtctgcaaactgaattgagttgctttatgtatgagctttgccattctcagagatgccctcctgttctgacatgatgttaaatcccttatattcatgtctactctatcacggtatttcatgaaatgatagcgatttcaagttcaggattttacacatcaacgttcaagcacagacatgtaccggggcgagaaaagaatctataatcggacttgtaaacggattcactacacgtttcagagggggatttgcattgaaaacaataaaaagaaaaaaggtgttttctattattctggccagtttattatcggtctcattaacggcttgtggatcaggaggtacggattccggcacagctgctggcggggacagcaagagtggcaaagtcacattggagctggcaatctctaaaagttctcaggactctgctttcatccagcaggacattctcgatgcattcgaaaaacaaacgaacattcgtgtcaatttgcagctgattccagcggaacaaacgacaactgtactgcaaaccaaactggctgtagatgaaacgcctgacattattcagtacaatctggcgagcgcagtcacagacctgaaccttgaacgtaacttcgagattctggataacgagccttgggcaagcagaattgtgaacaaagacgtcctctcttctggtggtcatctctacagcttccatgtcagccaagatacggggatgcaaggggtcgtttataacaaacaaatctttgaagaactcgggttgtcgcttccaaccaactacgaagaattcctggcgatctgtgaaaaaatcaaagcaagtggcattacacctgtatttatgccgtacaaagatgcctgggctgccaacatctggcctgctgcagcttttgccgattttgtagccaaaaatgaaccgactttttttgatgagttgaacagcaacaagaaaaaatggtctgatatcccggaattcaaaacattcctggaacaacaatatgagatttacactaaaggttacaccaacacggatgtgcttagcgacagctatgacatggccgtaggtaaattcctgaacaaggaagtggccatgatgtttatgggcgattggttaattgaaggcgtggccgagcaagatccaaatatggaactgggcgtattcccgattccatcgtcggataatgccggtctgggtgcaagtccactgggcggacaactgttcattccgaagaaatccaaacatttggatgaagccaaacagttcctggactatatcgcttccaaggatgtcgcacaacagatcgtcgattccaaaggatacgtatccaatttcagtgacgttactacaccggaactgccagcttacaaacaggatattgtagacaattatattacgccgaagaaaaccgtgctgacaacggatgcatacatgctggtcgaccgcagcgaactgtatcggttgttacaggatcaatttgcaggtggattgtcaccagaagaagtactgaaatcctgggatgagaagttcagtcagttgatgcaggataaaggcgtagaaggtttctaaagagtgaaatacaaggcagcataacataatcattcgttatgctgcctagctataacggagtgtgagacatgaaaaggactaaaaatctgtactcgtattacatgatatttcccgcactgattatctactccatctttttcgttgtgcctgctctcgccgctttctattattcattcacggattggcggctggatcggctggagctgaagttcatcgggtgggataatttcgagaaaattttctcggacaaaacgcttattctggcgctgaaaaacacggcgatatttgcaatcgtcaccgtagttggcaaaaatgtcatcggtctattgctggccgtaggacttaacatgcgattaagaacaaagaacctactgcgcgcgatcttctactccccttccattctcagcatccttgtgatcagcatcctgttcactcccatgttgcgtaccgaaggtacaattaacaatttattggaatctgttgggttacattcgttaagccaagcttggctgaccaacccatcgattgtgatctggacgattgccatcgtctcgatctggcagagtgccgggttccagatggccatctatctggcgggcctgcagtccatttctcaagagtattatgaggcagccaagattgatggcgcaagttcgtggagaagttttttcaaaatcacacttccactcttgctgcccgcgattaacattaacctgatgctgacattgatcggcggactcaaagtattctccgaagtatatgtcatgaccggtggtggcccgggtaacgcctcacaggtggtaggtacaatcattctgcgatctttcggcgaaggcaactggggacttggtaccgcggtcaacacacttctcttcgtggtcgttaccattattgctataccgctattgatcttcatgcggcgtaaggaggttacggaataacatgggctatacacgcaaactcgccatccgcaactatattgtggaaggtttcctgatcctggcctctcttatcgttctgttgccgctagtcattctgatctttggttcatttaaaaccagcgccgaagtgcttagcttctccctgagtttcccggaaacatggcagttctcgaactatgttcgtgtcttccaggaaggcggcctgtcgcgagcgttcttcaacagcattttgattactggtgtatcttccattattaatatcgttgcctcttcagcagcggcattcattctggcacgtcgggaaaccaagctatccggcacgatctacatgtatttcttcatgggactgattgcgccaatgtcgattattacgaccatacgagttgtacaaggattgggattctacggcagcatcacaagtgttatcctgatctacgccgcgttaaatacagccttcagtgtattcttgtatagtggattcatcaaaaccattccacgagcgctggacgaagtggcatttctggaaggagcaagtgtgttcggggtgttcttccgcatcgtcacaccgcttatcctgcccgttaacgcaacggtagcgatcatggtgttcatgtccgtctggaatgacattacaattccggtatacttcctgacagacagttccacctggacgatgccactatcgatctacaatttctacggcaaatatagccgggactggaacctgatcttcgctaatctcgtgcttacttcgctgcctgtattcatcctgtatctatttgggcaaaaatatattgtcagcggccttactgccggtgcagttaaaggttaaaccttatattctcacggttctcaaggcatagaattggattattcatgacgtactcaacccccaccagatctggcgggggttgttttatttatagcgagaaaatgcatctacgcctctttatttttgaaacaattgcgggtaaagggcagcaacaccaccagcaagaccctgttgtacattccgactggtatcatcagcaataatctcgtagagatccgcttcgatggaatctattgcaattttggcaatatccgttgggctcgtttttggtgcgtcgatacctgccgtcatatccgtatccatgaacgccacgtgcaatccggcaacgctaacgttcttaggggctaattcgagacgtaatgcattcgtaattccccactgagcggattttgcagctgaatatgcacctgagttaccaaggcttagccaagatagagcggacaggatattcagtatcgaaccgcccccattcttctctattaccggtgcaaacgcacgaatcattgaaagcgtaccgaatacatgtgtattgaactccaagtgaatatcgttcagctcacctgtgagcagagaagcacccgtagcggaaccagcattattaattagaagggttacatcactagctacctcagctgcagccatgacagattgtggatccgtaatatcgagttgcagtggaatagccccgggcagatcaatggattcagggtttcgcgcgccagcatacactttggttcccctcgccagcagttcaagagcaagttccttacccaaccctcgattagccccacttacaatagcaacttgtttggaaatattcatttattattactccctctcattgagaatgtattcattttcgagctgttatgggaatgatcattctcataactcccaatatcaatctatcacatcgggaacgatcagtaaagaataacttttataatccatgtctttaataaaagaagatgcccgataacctttgaaaaaaggctccgagcatctttctttggtccttcattgagaacggatttacatatggattatgattttatgtcatacagattcgcaggtaacgcctgcacaaatggtgaccagtcactcactgtatatagatgaagtcggtgcatggctcgtgtgcaggccgtatacagaagcttgcgatcatattcctggctgtaagcaacgggtgaagcatcatagaccaggacagcatcgaactcaacgcctttggcgagatacacaggaataaccatgattcctttttcgaaaatctgtgtgtcctttgttatgagctgcagcccttcgccgccttgactttgcaacctttcataggcgtcacggctttcagccgcggtctttgtaatcacagcgatggaatcaaacccctccgccttaagcgcggcgatgtctgcgagaatctgcgcaccacgcagtttttcgtccttcaatcctgttaaaagaggcttctgatctcccctttcaaacggtctgatctcttctccccctggtaacatctgtctcgtgaattcaacaatctctttggttgaacgataactgcgtacgagccgtatcaaagtagtttcgccttctccatataggtgaaccagtggcgagttggatgctgccaaatccgtagcctgcataaagatcgcttgcccgaaatcccccagcaccgtcatgcgggcacgaggaaacagtttcttgagatattcgtattgaaacgccgaataatcctggccttcatcgacaaagacataacgaatctctgtgttcgtccggacgccttcgatcatctcttttacatataaatacggagtagcatcctcatggaacagcttgttctgaaggatcatggccttggtctgtttacaaatctcaggccagtgctgtggggggattgccccattcgtttgttcccgataagcggtctcatctacaaatagttgttcgtatatccctttcacatccacgaactgaaatttccgcacactctttcttaaaggtttaaacatgtctttcaccaatttctgacgaagcaactcctcttcccgcactccaaagttaaaggcaccctcatcttgcactgccttgttatttccgttctcacgggctgcatatttttccgccacatcaaacacaggcttttctttgtgcaacatgcggaaagcttccatataatcatctgtgtccagataattcaactcctcctgaacccagtctgcttcccgttccagacgttccagcgaaacgagttctctcagcagccattcctgcaaaagaagtatacggttggacaaggtaagattctgatccaaactgtaaaattgcgtcttaatttggtccgcagtgatgaattcacgttcccgaaattgaatcccgttaaaccgcatcccctcccgccgcagccacttaccgtagttttggagcacttgcaggaatgtctcggaagctttgtacttgatcgcctcgagacgagcttcataacctggatcttcttgggctgtcagcacatattcaatctgatcaaaggcatcctctggtcggatggaggaatccagccaataattcagatattcctggaaagttgtctgctgcatgttctcttcgccaagttccgggagtacagtcgagatataactggtaaacatcggattcggcgagaaaagtacaatctgatctgctttgacggtctggcggtgtttgtatagtaagtaggccactcgctgtaatgcagcggacgtcttaccactgccagctgccccctgaacgataagcattcggcttcggtcatcacggatgatggcgttttgttccttctggatagttgctacaatactcttcatttgtgagtctgctcccttggcgagcacttgctgcaacagttcgtcaccaatcgtctcagttgaatcaaacatgctatgaagctgcccatgttgaatctggaattgacgcttgagctccatctttccgtcgattcttcctgaaggtgtgtcataacttgctggcccgggagagtgatcatagtacagacttgcaattggcgtacgccagtcatagattagaaagttcaaaccatcttcatccatgaaggatgatacgccgatgtagatctgttcagtcaatgttatgcctttttccttatagtcgaagcgaccaaagtacggcgttggaagcagtctctttgtatttttccattgttgtgttaacagcttgtgcccgcgctccctctcggccaacactctcgactgctgattaatggtatagaatgcatcttcaaaatccgtgtacgaacccgtgttaatcgttacttcttcccagaaccgtttacgaatttcggcagcctgttcatgcagtccggcaaccttcggttctaactcgtcgagtcgtgcctgaagtttgttcctcacctgcactagtctttcctcttccaacttccattcgtttgttttatccatgaataagtccactcccttttccatttattaggaccaaaaaaaagagcattgacaaatcggaatgtcggatgtaaaattaaattaggagaaataatgattcaacctttacattcaatataaatgtcaagtgcgctatagattatatcatggctttttttcacgttcaatgctttttttcgttctgtctgagttgaacaataatttatataatataaggtgtccctcgagctacactaggggcatctttttttgtgtcctgggcatggttcatatcctgaatgcgctggaagctatacacccctttataaattcgataaaatgaacgaaacatgaaacatgagttgatgcttttgggagggatacataaatatgaatatagaacctgtggaggaccgttgtcctgttgagtttgcagtcaatatgattggtgggaaatggaagttattaattataaatcgtctcatccgccattcaacaattcgattcaatgaattacagaaaatgctggaccccattacgcatcgcacattaaccaggcaattacgagaacttgaagaagctggtttgataaaccgtgttacccaccctgtagttccgcctaaagtcgaatattcccttacagaaaaaggacaaagcctgacttcgatcttgtttcagctaggtgattggggatcgaaacatatgtaaaacgccttcccatagtatcctaagggatactctatatcattaatgtgcgtacttacgctcctattctaaatccgttacgctgaggtcattgctgagtgttaactcattcattccaatcacatattgaaaggaagttattgaccactatgacacaaaatgatcgatttttagtatatggggcatcgggcgcccaaggcggcgctgtcgctcaattactcgttcaacacggttgtgaagttcgcacgattactcgaaatgaggcaacagccaacacactgaaggaacaaaacattgaagctttcatcggggatctatcagatgtggaacagctccatacggcgcatgaaggtgtaagtaaagtcttcctgaacctgccggtggagttcaatccggataagatcagacaatatactaaaaatgcaattgatgctgctatacaggcaaacgttaaattgattgtagttaacacaggtacctatgttcctgaccctatcacccattccaaaggaattgaattgaaacgtgaagttatccacgaattgcagcaaagtggtcttccatatatcattgtggaacccattgtatacttggaaaacttcctgattcccggaatactgaacaatggcgttttggcctacccggtaccagcagacaagccgatctcctggattagcttaaacgatgcagctcaattccactattatgccttgactcattcggaattggcaggaagcattatcccagcccccggattagaagccctgacaggtacacaattagcggaacaattcagtgctgtattaggtgaaaagatcagcttcatgtctcttccttttgatcattttgaagcagcgattcagcctttgttgggaagtgagacagcagcaggtcttaaaggattgtaccaatggattgatgggcatacagatcttcttccacggtatgaagagttagatgataatatcaaagccaatcttaaattaaccaaaataagcgattggattcatcaaacaatgattaaataatattttatgaacaagccatttgaatctccaacggagaaacgagtggcttgttctttttatatgagaactttaatgggctcaactgattcaaattcagagattctgataggattaggcaaaactttgatagaaatgtggtacaggttgttcccttcgttatgacataataatgtgtatatagatcaccctacaggtggcaataataaacattagaaaggatttgaacatgacatggaatatacgaaacttggtaatacaggcttggacgtatctcgattttgcctaggatgtatgggatttggggatgccagtaaatgggttcatgaatgggtactgaatgaagaaaattctcgcccggtgataaagaaagcgctggatctaggcattaatttcttcgatacagcgaatgtatactctctgggtacaagcgaggagtatcttggtcgggcgttaaaagattatgcaaatcgggatgaggttgtcattgctaccaaagtacacggacaaatgcatcaaggacccaacggttctggtctttccagaaaagccatcctgagtgagattgataaaagcctgaaacgattggaaaccgattatgtggatctgtatatcatccatcgttgggactacaatacgcctattgaagaaaccatggaagccttacatgatgtggtgaagtccggtaaagtgagatatattggcgcttcggccatgtttgcatggcagttccaaaaagcattacatgtagcagagaaaaatggttggaccaagtttgtctccatgcaaaaccacctgaatctcatctaccgtgaagaggaacgagaaatgttgcctttatgcaaggaagaaaagattggtgtgactccctacagtcctcttgcttcaggcaggttaacccgtgactggtccgtatcaacactgcgatccgagacagacaaaattcagaaatccaagtacaatgcgacaagtgatgcggatcggcttgttgttgaacgagttgcatccattgcagaaaaatacggtgtccctcgtacacacattgcacttgcgtggttgctgcaaaaagacactgtagcggctccaattatcggtgccaccaaaatatcgcatctggaagatgctgtaggtgctctttccgttaagttgacctcagaagacgtctcattccttgaagagccttatgtacctcaccccgtagtaggtgctcaataatcgcttaagcttaaagtacagaagacctcctctttccgcatccggaagttgggggtcttctttttatatcgcgatttatttacgccagaatgttgaacattctgccttatccgctatattgaactcaatcattctctcaagtaacgaaaaatcaatctcctgtttccacttcatccgcaccaactctttggtgtgatcataacccgcctgtgtgatctcttccgaaaaacgattaattcctgccttctcgggagcaacagccaagtgttgcttggatacactaaagccaataataaaggtctcatggtcggtaaacatcggttgattccaggctattttttgttttaaattcgggaatttttcagtgacccagttcaaaacttcttccgttcgtgcctggtgttccgggttatcgatgcgtgctataaattctgcaaaggtctccattagtttccccctataacaagaaatctactacttatattgtccaattcaatcttattctatcatgaatatcaaattcaaaaacccttatctgccgataactcaacaaaaaatgagcagcctgctagactttaaatgttttcttttatccaagatcgcaactgatcagcataaaaagcgcgttcatctggatcggacggagaaccatttgtcacataaagttgatcattcacgtatctagggtaaacatggagatgataatgccacacgtcttgattgccagcaggttcattatgttgccgtgtcgaaatcccatcacattcatatgtacttttcattgcaaatgctgtaagctgagccgcacggtgaatttcaacagcgtaatccgcagggagttcaaagatgttctcgaaatgttgattcggaacaataagaacatgtcctttattgtttggccaccatttgcccgctataaatgccgttacctttttattttgatagatgatatccctttgttttgttccctgatcaggtcgctcgataccccaaatacgacaaaatggacattcgtacccttccggctgatgtgaaaatgatactgtcatctttctcattccactcccttcatgtttacttcactagttattagacgcaggtatcttctgttcgttgcgaaaagagcacgggttgtagaatgatcagcaattaacaaactgaaaagcaaaaagcagctgaccttggcggcggctgctttctactatctttaactatcactattgcacacttcacaattacatggtgctgatatcaataacaaagcgatatttcacgtcggaagccagtacacgtttgtatgcttcgtcaatctgatcggcggagatgacctcaatgttaggtgcaatatcatgttctgcacagaaatcaagcatttcctgtgtctcacgaatgccaccaatcatggaacccgcgaatgaacggcgatggccgatgagtgagaatacgttaacagctaaaggctctgcaggagcacccacgttcacgagtgtaccatccagtgtgagcagtgagaaataagcgttaatgtcaatattcgcacttaccgtgttaatcatcagatcaaatgtgcctgcaagtttctcgaatgtttccggctcgctggtggcaaagtagtgatctgcaccaaattgcagtccatcttcttttttgctcaaggattgggagagaaccgttacttccgcacccatcgcatgtgcaattttgacagccatatgacctagaccacccatacctacaacggcaaccttcttacctgggccagctccccagtgatgaagtggtgaatacgtcgtaataccggcacacagcaaaggtgcagcagcatcaagtgcaatgttatcagggatgcgcacgatgaaatcctctacgacaacaatgtgagttgaatatccaccttgcgtaggctcaccgtatttgtctacaccagcgtaagtaggaatatttcctttgagacagtattgctcttcacctttgcggcagttatcacactcgccacaagagtcaaccatacatccgactcctactcgatcaccgactttatatttggagacccctgttcctacatcggttacaatcccggcaatctcgtgtccaggaacaagtggataattcacagggccccattcaccgtgggcagtatggatgtcagaatggcagataccagcatatttaatctcaattaatacatcattagtatccagatcacgtcgtttaatttcagcacttctgaattgttggtctggtccgtcaacggctctggctttagctataatcaatgggataacctcctagtaatttaaagttcaaaataatcttactccctctagttaactctaggtcaaatgtttatcttatttttttatctccaacgtactttgacatccagtaatccaacatggtagaattcactcggatcatcctagagttaactcgaagtctacccccagtagaaaggaattttatgaaaatgacctattcaatcggtgaagttgccaaaaaattagaccttacggtatatacattgcgttactacgacaaggaaggactcatgccttttgtggaacgtaccacgagtggaacacgtttgttcaaagactccgacattgactttttaaagatcatccaatgtctgaagatgaccggcatgcctattaaagacattaaggactttattgaatggtgctctgagggggactcctcgctgaagcaaagatatgacatgtttacggagcgaaaagctattgtggaagcacaaatggaggaactaagaagaaccatggaagtcatcgagcacaaacgctcctactacgaaacagctttggaggctgggaccgaagagattcacaaaattaaaccgatggaaaatgccatcaccaattaatggttcatactttctattttctaaaattagcgcacaaaaaagtagcttgaagtcctctaacggatttcaagctacttttttgggtatgtctctactcatcatttttccaaaagtttcatcgttacatggataatacggtttagtttttctttttccgtcgaggttcttgccatggctctgatgccgacagaaatattgtgcaggtactctgccatttccttcgcatcatgatcagaagagaattctccctcccgctgcccccattgaatgatttgctcaaacatttgctctgcttcattaaatgaatcaagagatcgtgtatccacgtccggatcgcgtgtaccaagctctacggcggagttcacgatcaagcatcccgatggcgtatcctctgcttcactgatcataacttcgaagattttatgcagtgcttccactgccgtcttggatgccttgatttctgcaagtaatgtggtgctgaccttacctctgtaacgatccattgcctgcaaaaacagcgaatgtttgtcgtcaaatgtatcatatatacttctgcgatgaattcccatatgctcaaccaggtcactcatcgacgttttctcgtaaccttgttcccagaagatcttcattgctttatccaatacttcattcacttcaaactctttacttctagccattcgacttccctcccaaaatcaatctaacacatcgggaacgatcagtaaataaaagatgcagatacccttctcattctcatctgatcatgtattagctgaaccgtaagtgtatatcttctgtacttgttgtatatcatgacctgtgtacttgtgattatgtaaccagcaatcagaatgtcttatccattcacatcaaatgtttgcctattcctatccgttttctaccgccttcggtcaatataagatagaatgtgattattatgttgtgaggaaaaaaggagaactttgcatgtctgatcaaatacatgaacaacaaaacgaattagccacactcattgatcgttattctgacaaggatggggtacatcctacggcaatcccttcattatttctaatccgtgaatcggttgttactgaacctatatttagagtgaatgaaccatccttttgcattatcgttcagggtgagaaagaggtcctgctgggacaggatcgtttccggtatggtccaggaagttatatcgtggcaaccgttgacttgccggttagtggacaagtaattcaagcctcgtctgaggctccctatctggccctgaaacttgaattcacatccagtgagattctggaggtattgaaccattccgatttcccagcaagaccgcggaaaacaacgagacgtgccatgtttgtcagccaagctgagccgtctctgctggatgcagtcttcaggttagcccgtttgttggaggatcattcagaagatatcccgctgctcgctcctttgttcaaaaaggaaattctctataaagttctgaaaggcccacatgggaatgccctggaacaagctaccatggagggcagccatacctatcgaatcagagacgttattgaatatattatgaatcattctgagcggaattttcgggttgaggaattggcggatttggcaaatatgagtactgcctcgctacacagacactttaaagaagtgactgccatgagtccgattcagtttcaaaaacaattgaggctgcaagaagcgcgccgcttgttattatccaagtccaccgatgcagcagatgtagcatttcaggtaggttatgagagcccttcccaattcagtcgtgaatattctcgcatgttcggattcccacccagagaagatattaaacgcctgcgaagtaaaaccgatgagaccagtaccatctcttgactggttactggctagtatcgttcctttacctcgtctagtttaacctcaaaaaggactccttctgttttgccagtcggagtccttcccttattcatgtattaatgaagatcactaaatcattaacattaaattatcaatacattaaaaaccagtcgtatattgttttggaacttccgttgtcttgcgcaaagcagacgcagcttccaaggcccagtaaggatttcttaacagccctcttccgaccgcaacgagatcggcttcttcatttccgatgactgcatttgccaatttcgggtcgtccagtcttccaacagcaatcacaggtacatcaagagcttctttgattgctttagcgagaggtacttgataagctgcgtgagttcctggtctgcccgatgcaccaataggtccctcgccaccagatgagatgtcaaatacgtcaacacctgcctctttataagccttggcaaactcggaactttcgttaatgccatagccaccttcgacgtattctttggctgaaatacgcatcatcaagggcatatcctcgggcatctctgcctttgcagcctgaatgatctcccgtccgaataacgttaaatcttgaccatattcatcttctcgcttgtttgttaatggagaatggaactgatgaatcagatatccatgtgccccatgaagctcaatcgcatcaaaaccagctttcacagcacgagctacagcactccggaatttttcaaccattccttttacttcgtccgttgtaagcgctcgaggttgcttggaattctcatcaaaggcgatcgcggacggagcaactggtacctcagcatcttctgctttgcggcccgcatgagcaatctgaataccaaccttggcaccataactgtgacacgcatctacgatccgcttcagagccgggatctgttcatctgaccataacccaagatcataatctgagattcggccatccggctccacatctgtcatttcaatgataatgagacctgttcctcccacggcacgactaacgtagtgcatataatgccaatctgttgcaataccatctttttgctcaactgaatattggcacattggagccattacgacacggtttttaagctctaggcttttaaaagaatatggactaaacaaatctgtcatcaaaataaaactccccttttcatgaatcatgaataataaaaatgcatgcgcaagcatcaaattaatcctgcaattaataactcgtatgatttagatctcacatttatcttttacttcattacataaatacattcaaatccatgctttcgcaaaatacgaacagcctttttggattgaagcataccaggtgacattataattacgttatcttctcgaagaaggtatttttcccatgtgaaagcaaggcgtcccaacgagatgttaatcgtatccggagtaggattagccatataatccgtcgcatctcgaatatcaatcactttatactgccgaaaatcacgctcttgtctaagaaatacttgataatctatatattcaagattgcgcactggccaaaattgacgtacaacgatgaagatacctaatatgaaggtcaaaagcatcaacataatcattgtatagccctctcttaactcatcagatatcgtcgaaaattttgttttggatcaaagcccactcaatgcctcagatattgtatcctcaccagcgattagatcaaatgaacgcttgtaggtattcttctcactcaaactggccaaaatcacatgagctacatcttcacgagcaatgttaccggttgtgatattctcagcagcagtaactttacctgttccaggttcattcattagaatccctggacgtataatggtatatgttaatccactgatctctaacaatctatcagcatagtgtttcgctgcataatatggaaggatgttatcatgccagttctcacgattattggcttggatcgcactcaccatgataaatcgatcaatacccgctttttgagccgcttcaatggttttcccggcaccatccagatcaatcaggagtgttttatcatatcccgttgtaccgccagaaccagctgcaaatacaatggcatcacaacccgttacagcagctacaagtgagtcaaccgtaccttccaagtcggcaagcaccgtttccacaccctgtgctgcaaatgaatctacctgttcttgttttcgtaccatggcaagaacgatgtgttcttcactattcttcaaaagatgaataagctgttgaccaatctgtccatttgatcctacaacgaagaccttcatgttcaatacctcctttatacaaaatcaccgcatccatattaaattcatgcgcatgcatttaatttaacggatatattaatgagtgtcaagtcttcttatagggtaaatgactacattaccctatattcaccctagccttagaacaattctttagtgaggttctctaatcgagtctcaaatccatcctgttccaattcagtttgcaagacctgattaaacgtttgaagtgctttcttgtatttattctctccaagctccgtaattcgagtgtaaatgccacgccggtcatcttcacatgcatgtctttccagagccccacagtctttggcttccatcctaacgacgagcctggaagtagcactttggctcaaccccaccagatcttgaagttgctgtaggcgtaattccttaccctccgcattatatatgaagtttaacacataaaattccttcaaagataagtcatattgttgaagcagagcttgttccagcttctcgttcagatgggtatgaatgttagagaaagccaaccaaacattcaaacgttcactcttttgctgcaatctagatcaccccacttgatatttaatgttcatcagctgttatcctattgtatcaagcttaattacattggtcaaaatccatccaagatcgacgtgtataacatcctaagcatataagaagagcatttccccgtcttgtaacgacatttggaaatgctccagtattaccatttatgcagtctaatcttacttcgcggtaagcaggctatcggaaataaattgtagctgaccttccaacgttaacggatcgttgtacgagtctgaagtcggatcaagctggaacacatgattcgccttcaccgcaggcaattttttccacaatgtattatcatatacgatctttggatcggttgtgtctcccgaccacgggctggtgaagatgatatcccccgcatactccggtaatagttccatggagatcgaagcccatccagttccgctgtcaatcgcttcagcttgggccttggccggtgccttgagatcaaactccccgtaaataatttcaccgcctcgaccatagttatgaccaaatacaaataatcctttggcgtatggattcagtatggaaacggtacgatctcctacagcttcctgaaccttgggcttcagttcgttgatcttcgcttcccatttagcattccaagctttcgctgcgtcttctctattggtgagcttacccatttcaagcattagatccttgaaatttcgcttaccatatgcaatctgtacaacaggcgcaatctgctccagcttgtcgatgccctctgttccagtgtacacgataaataagtcaggttttaaactgattagtttctctggtgtaggctcttgacccagatcacttgtgcccgccgctgcaagttgatccttgatatatttgttgtccatcgctcctgataaagcgccgactaccggtgcatccagagcaacaaagtagcctgtcgaaaatgatgtcaaatcaataatgcgcttaggattcttcggtacctgtacttcgcctgcatccgattgatatgtaacaagttcctcttcggcagttgccgttgattcagcgggagaagctgaatccgagttcgtcttggtttctgtctccgcagccgcattcgtactgtccccggttgtactattggtcgtagcagactgaccacatgcactaagtacaatcagcaagataagtgccatcatgatccatattgattttatctgtttacgcaaaataaacccaccttttcgttgatattgataatcgttatcaacgatatcatgctctgcaggatttgacaagctatgtttatttcaccccctctatgaactctaacttgcaagtcaccaagttaaacagctatcatcaatagagtaaaccattcactttttattaaaaaagagagttttgaaaagccaatgaaacgtaatcaaggaggaaaacatggaagagattatattgtggttaaagtatttgtttttaggtattgttcaaggtgcgacggagccaatccccgtctcctcaagcggtcatctgatcatcgcccagaaacttatgggcatcaagcagaatggattgtcatttgagattttaacaaacacagcatcacttatcgctattatttttattttccgggaagatatcaaaaagttgattattggtgcattaggttacctgcgtactcgtaaagaagaatatcgagcagacttcatgttttgcttatacataattattggtacgatccctgctgctgtcgttgcagtcctgttcaaggaccggattgaagaaatcttctcatccgtatataccgtttccatcgcgctattaatcaccggggttgccttgtggcttattcgtaatcttcgtggtcgcaagcaagacggtgatctgtctacgaaagatgcattgttggtaggtctggctcaggcggtcgctcttattccggggattagccgctcaggggcaactgtaattgcgtccatcgctgttggcatgaaacaggaaacggctttgaagttctcctttatgctgtacattcccataagtattggtggactcattatgggggtatccgacattgccaatgatccgaatcgatcacaactggctatcccttatctgatcgcattcatcacgacactctttgtcacgtatttctccatgagatggtttatgggcattatggccaaaggcaatctgaaatacttttcgtattactgttttgccgcaggaacattgttactgatcttcttataaaaaatagtccacacaccaaaaggaacaaccagcgatggttgttcctttgttgtatagtggcagaaccttaatgacctatagcaagagctagacggtcaggcgcgtagccttgttgcttctgttaaccagctctgtagccgcgaacataacactgaacagaatcagcaggatcaggggtaccatggacattccccattggctggctataagtcccatacctaacgggatgagtgttgaacctgtataggcactggccatttcgagtccaattacacttggggatgccttctcaccgaagcgttccggtgtcgcatgaacaatactcggatagatcggtgctccgcccaatcccacgataaataaagcccctgcggcaatccagtaaggaatcggcataaccaggataactaatccgaagcatccgacgattccaccatatctgatgagatttttgctggatacatgagtcgaaagaaaacctgagattacacgtcccaagataatgccaatgaaaaatagagaggatagtgctgcggcagtgcctggagaaactcctttgctaacaatgaagaaagaagccatccacagaccggcagcagtttcggaaccgttgtaacagagcatcgcaatcatcgacattttcacgccggggatacgtatggcctcacggttgcttacgcgtttcttctcatcgcctgaaccctctactcttcccttctcaaaaatcttccatagagacaaagttgataataagaccaccacgatcccaagcaaaatcaacgctacagtaacgtatcctgcacgccagttgtttgcttgattcagccaatatgccataacgagtgggcctgtcactgcgccaattccccagaaacaatgcaaccagttcatatgcttggccttgaaatgcaatgctacataattacttagtgccgcatccaccgaacctgcacctaagccgagagggatcgccagaatcagtaaaaacacaaaattctcagaaaatgagaatcccaacagcgcgatcgttgttgagaggatactgaatactgtgactttacccgttccgaaccggtgtaacaatcggctggccgttagactggacactactgtactaaatgaaatgattagcgatatgtaaccagccatttctgttgtcgcatgtatatcgtttttcataacggaccaggcactgccaagtaaagcatccggtaatcccagccctataaatgcgagataaataatgattaacaataacgtgaccatctgggtgtctctcctcagtttgtttaatttctgattctcgtcgaaccacccatataataatattgatatttctatctgtaatcttcctatattttgactccttatatcagtattctgatatattctggcgacttattacctatatcactggttcaggataggtatttctccaagcaaattcttcaagttaatggcatcccacggcatatgctcagttatccctaatccaactacatctgtttcttcagacagttctttgatcagacgaagcaagtgaggtatttgcatggttcccgctggtgaaaaaacataaggttcccctggtttagcgaataacaatgaacggaacatgttaggatcaagcacatccagatcaaggtgaattgccagatgtttgataccaatctctttaatccacttcttaatcgaatccatgccatgggttaattcttcagttccagccgttcggatacccaatctttgaatcacttcggtttcctgttccgtgggggttgtcaacccggccatgaagacatgttcgggcttcaaggggacactcacatatttagcaaactccagatcgccttccccaagaaggttcccaagcggtaaagtatgaccgttgtcatagccctcgtatctagccagatcaccatgtgcatcaatccatatcaaaccaagttctccgccatatcgttcatttaaataagcaaacggggcttgttcaaccaaacagtcaccgccaaacatgacaatgcgatcgggctggtgagcttgaataatatgctgggcagcctgcaattgctgaagtagcggtgctctgccttttatcccgttctcgcttaccagagatgttccatcataagcctcaacaggaacatgaatgagaggttgatcattgtcaggtgcaagccatgcaagcaactccgctccaaatgagtagtttggattatctccaccttgccattgtggcataagcagacgtattgttttttgagtcatcgtaaatcccctttacttcaaagtaagattagtataaactgagcccaaacaaataaatagtacggtcttttatgataggtactacccggaaggatagtgtaaatgatgagtatggctgaataccacggtaaagttaaaaacattcaagatactccttttggatatacgttgtctgttattggtggtaaatggaaaatggtgattttgtatcttctggcagaaaacccacctgtccgtttcaatgaactaaaaagacagatcggcgctatcacgtataaaacgctgagttcacaactcaaagaattagaagcagatggtatggtcgaacggaaagagtatccccaagtccctcctaaagtcgagtaccgtctgacagccaaagctgaaacgttattgcccgttttggaaggactatgcgaatggggtgtccaacatcaagaaccttcgatcaataatagcgcaacggattgaacgcttttgtctatatttcagatgagataattagagtaaatgcagtatgtaaaatgcaaaaagtcgccaatcggcgactttttactttttctcttgtgttcctctgtccgttcagcaaataaaagctgtgattcgtagaattatactttttcgtgtaccagatctttctgataggccaacactctgtcccaatttccactgaaaacaggaattcgataataccctacacgctcatacagcgctgcagcttctggttgcaatggacctgtttgcagtttcagattggtataaccaagttcgttcgcaagacgctctgcctcggccaatatagcctgggcaatccccttacggcggtaaccattgcgtgtatacatgcgtttaacttctacagatgtttcatcaaagggtctaagtgctccgcaaccaaccggatacccgtcgatcctggcaacgataaaagccgcacggggcacctcaacgtctgacagttgaaatcctgcagttccatcaccaccatataacaaaccgagttcttcactcagttccttgatcaatagtagcgaatcctcgctccgaatatcttcagctgctgcatgcacgatatgtgtcatcccacataccccctttatcttattggacttattggtttaaatgatatatctaaattatcattcccaacaccaagcgtcaattcccccattcattgaatatttctataagcaaccgaacatatctttttgcagtctttattcgtttacataagaaatataacgagcaacgatgtatatgaaattcaactctcggaggtctgatattatgggaatttcaaagggaataacgatgcttcagcttgattttgaggggaatataattcaccctgtgctgatatgggatgaagaaatggttgtgttaattgataccggattccctggacaatatgacgatttgtgtatcgcactcgaaaagattggtgtgccgatcagccaacttaaagcagtgattttgacgcatcaggatatggaccatatcgggtgtctacccgatattttgaaagagtgtggctcacaagttaagatatatgcgcatgagctggataaaccatatattgaggggcagctccctcttctgaaagacagtcacctcgagcatcctccaatgggcaaagtagatgaaacggtgactgatggtcaggaactgccgttttgcggcggaattcgcgttattcatactcctggtcatacgccaggtcatatcagtctatatttgatggacagcaagacactcatcgccggagattcaatgtacagtgtagacggcatgcttggaggcattcatgaacctactacattggatacagagacagctcgattctctttgaaaaagtatatcgaactcgacatttcatctgtggtttgttatcacggaggactaactcataggaatgtaaatgaacagatctcagggctatataaaatgaactaacgaatagtatgctaccgatgtagttttcttgcagaaagcttgtaggcgaacgctccccttcttcaggttctttctgtcctctccgttttgtgtaaatgtttagttcaatttatatagttaagggtttatggtttggcatactgtaaaatggctgtagccgcacgaattcgcagctcttcttcttcactgtgtaacgcttctctcagcacctggagagctgtctgaatcgtggcttcatctacccctgttgagagagtgttggttgcttcggttgttatgctgactgcaagacctcgatccagctgtgcttgtgatatgggatactcaaacttcgcaaggatggctgaatcattttgcagtgcctgcactttgtcattcagctccgcgagaggaatacgacccaaccatgtaactccgcgacggtgacagatcaagtcctcttcagaaccagcggaatcgtcgtaataataatccccgatatccccaacatacgtccattcatcatcgctaattaatatataatctccatcctgcatgaggttaccaaacatatgtaatgtcgcgagtgtgctcgccaattctgcttcatccaaggggtagtgttgaaccaactgttccttccatagctccggaggggtatgctccagatcccctgtacctgaccaggcgattccaatgtaattatcctccagaaatgatgctactctgttgattccgtgcacagtcgactggatatgatacagattcatgcgtaccgccttcctttcaatcattcgtatgaacatagttcaccattgtaacattagtgatgtctatttcaaacgtaatgacttcttcaagttctatacttcatgctgaacacgcctttggatatagcctcaggctataactaggtataatttaatggaattacattataactccggatctgtgataaattttgtgtaacataaaagcagaggggttttaaacgatgacaaaaagtagtgtattgggatatccgcgtattggtgctgatcgggaatggaagaaagcgttggaagcgttctgggcaggcaagctggaggaaacagaatttcacgcacgtttgcaagagatccgcatcgatcatttgcgcaagcaacaagcaaaaggcatcgacatcattccggtgaatgactttagctattatgatcatatcctggatacagctgtgatgtttggcattatccctaaacgatttgcttatgatggtggttccgttccattgtccgtatattatggcattgcacgaggaacgaaagatgccgcagcaagtgaaatgaccaaatggttcaacacgaactatcactacattgtacctgaactggacggggcttccccaactctgacggagaacaaaccacttctcgcttatcgtgaagcaaaagaaaaactcggcattgaaagcaagccggttatcgttggaccgttaaccttcctgaagctctccaaaggctatgataaatccgagacagacgcttggttggaccgcttgcttccactttacactcaattgcttcaagaacttgcgagcgaaggcgttcagtgggtgcaggtcgacgaacctattctggtaaccaaattaagcgatgaagacgtacagcgtctgaataaaatatataaaacatttgcagcagccgttccaggtctgaatatcatgctgcaaacgtactttgaatctgtcgaaaactacaacgatattgttgcactgccagttcaaggtgtaggacttgattttgtacacggactctctggtaacacacaatctattcggacatccggtttcccggcagacaaagtgctcggagcaggtattattgatggacgtgggatctggaaagcttcccttcaaacaaaactgaatttgctgaatgaattaactgagttcgtgacacctgaacgtatcatcgtgcaatcatcttgcagcctgcttcatgtgccggtaacgacagaccgtgaggcaaaacttacatctgaactgaagaatgcacttgcatttgcagatgaaaagctggatgagattgttcttttgactacagccttatcttcaccaagtgcagagattaccgccaaaatagacgaagcagagcttccacttcaggcgcttcagcaatccgaagatcggaaccgtaccgctgtacagaaagccgttgcttccatcagtgttcaacagccggagcgctcccgtccttttgcagagcgtcatgaagcccaacaggccaaatggcaattgccactcttcccgacaacaacgattggtagtttcccacaatctgctgaagtcagaaaagcacgtcagttgtggcgtaaaggcgaattgaacaacgagcagtatgctgccttcatccgggagcagattgatatctggattaagattcaggaagagatcggaattgacgtactggtgcatggtgagtttgagcgtaccgacatggttgaattctttggcgagaaacttgcaggttttgcctttacacagtttggctgggtacaatcatatggttcccgttgcgtgaagccacctattatcttcggtgatgttgcatttacgggtgaaatgacagtggaagaaacgaaatatgcccaatcgcagacagagcgccctgttaaaggcatgctgactggcccgattaccatcatgaactggtcattcgtacgcgaagacattgctcgtgagcagattgcttatcaattggcgtatgcgttgagacaggaagtcgaggcacttgaacaggcaggcattggcatgatccaggttgacgagccggctgttcgtgaagggcttccgctgaaagaaaatgaacaagccgattacctggcttgggcggtcaaagcgttccgtatctctacatgcacagtgcacgaaacgacgcaaatccatacacatatgtgctattgcgaattccatgacatgattgattccattgaagctatggatgcagatgttatctccattgagacatcccgtagtcacggtgaactgattcatagttttgaagaaaatacgtatgagctcggtatcggtcttggcgtatatgatatccatagtccacgtgttccaagtgtggatgaaatgagcagcatgattgaacgtgccctgcgtgttcttgatccgaagctgttctggattaacccggactgcggattaaaaacccgtggacaggaagaaacggtagcttctctgcgtaacatggttgacgcaaccagaatcgctcgtaacaatcacgcttcagctgctgtattgtaatcggctgcgaagcaggataacttcaaaagtaaagccggacaccccttcgttaaatgggtgtccggctttttatatggttactttttgtagttatattttgtagttacttttaacgtaaattcatttcacttgtaacatgacaatctctggcgttcctgccccttttctcaccatccaacgcttacaactagatactatctttcagccattgctgcaatggtgtatcttcggtcagttcaccgagcagtatgtgacggaactccccatccttatcaataaccattgttgcgggcaaacccgttatacgatacatacctgatatgttgcccgtcacatcaatgatcaccgggaaatcaaacgcctgcttatccataaactcacgaatcgtgcccttcgattcccccacgttaacaaacagggtttccacgtcattctgatagtcctgagcaatctggtgaacaatcggcatctcccttacacaaggtgtgcaccatgaagcccaaaagttaatcatcacggctttgccccgataatcggacaggctgacctgttcgcctgctgaattaaccgctgtgaactcaggggccacggcaccagcttcaatggcgttacctcgctgagattcgggtgtcgatacattttcgaaaatagcccatgtaccaactaacaatgcgatcacaccaatcaaaattgtaagtgtacgtctgcttttaaaactttttttctgcaataaactcaccttcactttaaaccaagactttgatggaatgctgcatggagcgaaccgaattgatcacaaaagtcgtgagtagagccctctccaacattacgtccatgattcatgaatatcacctgatccgcaatgtcgtctgcgatctccagctgatgggtcgagaacacgaccatgtggccttcctgtttgatgcccttgagcagctgagttaattcctgcatccagaatgggtccaatccattcgttggctcatccatgatgagcagtggaggtttcgacagcacagcctgggcgaataacacacgttggcgcatgcctttggagaaggtcgtaacccggtttttcttttgatcctccaaacctaccatggtcagtacttcctgtactctctccttgggaactttcctcagagaagcccagaacagaagcatttcctccgcactcagtccttgattaaattgataatcgtccggcatatatccaatctgctctgaataacgcttgcgctccttcaaccatcgcacattgttcaccgcaacctcaccggaggtaggccgaagaattcctgcgatcatacgcagcaccgtgctctttcctgcaccattccctccacagagggcaagcacttggcctgaagtaatgcgaaaggagatatcctcaacaattggttgctttttaatggatttgcacaatcccatcacttcgagtcccaccttatccatgagaacgccccctctcccagatcgcatataccgccaggacagagaaggcaatccagaataggcatatcccgatgaagatccaactgccacttggttgctgcacccactccacccatcgataatattctggtccaagaatggagccgcctcccagtttgatgactacaaacaatcgcaccagctcggccggattgatgagtgttagcataatcagcagaggtttcacccatagataaggcatcagtcccagcacagagagcaataacgtcggccatccaatgacagcgaagaaccatacggtcacggatatggttaaagcctgccaccgattgcgcgacaacgaaccgataaatagcgccaacgtcaggaataacaacaccagtccacaggaaaataccagaaaaagaagatatgtcacggcatccagtggattcccgattactccgctaatgacccccatcaggccgtatccaaatgcaacaatggtaattaaaacaatcgacagcccaagatacttcccaacaataaaagacatcgtgccgatgggatacgtggacagcagctgccagctaccgtcttccttttcggatgttagtgagaaggaaccgaggaacagtgtcattaatggtaagaggtagagaatgagattcaacatggaacctgtggtgcccgaatacccttcgaccagattctgcgaattcagaagtaacaagcttaagctaaaggtacaaaaaaggatcagaaacgaatacgcccaaggattgcgaaatcccattttcacttctcgtcttgcaatctgtatcatatctgacatcattgatcaccattttctattgtcatacttagtggcctgactcttctttcatctcaccttcctgatgcatctcattaccgtctccttcttcaccatgtccgtgctcatcatgcccatgttcacccatcatgtccatattctctgtgttctgtttccagtcatgagaggcaagatcctcagcggtcataatggttccaacaccttgctctgcaatgaaagcttcagccgagggcttgtccttaaagttaagaattccataggccataggcgtacgcaatgaagcgtcgtatacatacgtggctttgctgtattcaatccattccttgtcattgtaatcacgtacatagtccatgccgatgttatctgtgccattttctgttttccactggttcatgcaaccgatgtcatcgaacttgtaattttggccgtctttcgtagtgagctgtgttgcatatgcatcgtccttcacctgcattttacagatcgcacagatatccacgtcttcattgatcggcaatgccgcgtattttgttccgcaagcggttaacagcaccatgccaaacataagtaccataaccatggaccatcttctgttcaaacttttgttcattttcgtaatacccccatatagatgattataaaagttgccatacccaacagaattaacccgaacaaccacaccacattggaatctgtagcactttctactgacatgtgcagatcagattccgtatccatgctcattcgtggcgatttgtcggtagtccattgttctctgccttctgtaaacaactcactcagaaagaccatacccggtgattggaaaaagagctgataggctgaatttcgactgaccagttgctcataaaaaggattaattgcataggagatttcactgatcccatcccgattcagatcgagcccctgaaaagagtcccagtagttctccatcaggacattattcgggctatccagtgccgaagcttcaatgacattagacaccaattggttgcgtgtaaactcattagcttctgccagaacaagctgtatgccaacaaaattccgaagcaccgcattgccatggatctcattgcccgatgactctgctatattcatgccgacacgattaccctccaccacattgttgtgaattgaggattgatgcacgtcatacaacaaaatcccttgggagtgaacattggtactctgtttgcgaaaagaattgcccgatatgaccgtattcttgacgcccataatcatggcacctgtcatgttctcctctccggtattgtccatgacagaagagccgtcaatgtacatacagtggatgccgtaccttgtatgtaacagcctgttattttgcacagtagacttgcgactgttctccagatagattccatccctcatgccgatgatctcattggcttcaatgaagctatcatgggagttgtacagatcaatgccattgcccttctggccactgtaagcagaatcagacccggcccacgtaatgttgttccgctgaatcgttgcctgactcgaattccggatgatcatcccatacccttgggtctcaatgtgcagatctgtgatttcactgtttttcccttcaacctgaatcgctgcagtctgttcattcgtatcatgttcaattgtaaaaccgctcagtttcaccccatccgagtgaatcattatcgtagaggtggcttccgtattaacaactatgaccgtaggatcaccctgaatggtgatgtttttgtcaatcgtcacgggtccagaataacgacctgatgcaagttcaatgacttctccaggtgcagaacggtcaatcataggctgaaggggaatgagctcacgatgtccggaagaggccatgactgcaccgtgcggaagggatagcaggagcatcatcattccgattagaaaaattaaacctgtaacccgactcttcttacaactgttgaatgcacccaagcctgcccaaggattactcatgattcaaaccgcgcaattccggcttcttgttacagttgcttattgctgtggcaatgtattcaacgggtcttacattagtccaaaatatacgttggttgtacacaccatccctccattccacttaaaatcaactctccatgttcctcatccattgaagcaacgtaataaatgaagcgttatcacaatcctgatcatagtgtacttaaaatgatatttattccatatagctcaattaggctatagacgcaacatttttgtgtcgatattgtgatgtaaatcaaaaaaagccgccatataggcgacttctaagtaatatattattcaaatggataggtccaaaatgtttctctgccaaaacgtttcttgatttcttcattattcagctcacgattccctacaagctctgctgcctggaattgtgaacgatgggcacgaatggacgccatttttcgatccaaaaattcggatacgtcaacaaatacatccggtttgccaatgtactgttcctgattattagcgaacgcaacgcagtgaacaatcggacgttcatccacaggaagtttagtgattgtacgtataacagcggctcccgttgcatcatgatcgggatgaacactgtaacccggatagaacgtaatgaccagcgtagggttcaactctttaagtagcgacatgatggtatcttccagtaactgtgggtcttcgaactccagcattttatcgtggaaacccagcattctcaggtcctgaataccaatcgcttcagaagcttcaatgagttcctgtttacggatggcaggcaacgtcactcggttggcaaatggaggaatccccatattgcgccccatctcgccaagtgttagacaagcataggttacatgggcaccgccatctatgtatttggctaacgttcccgatacagagaaagcttcatcatctggatgtggatataccaccaagatgcgctcatgctcgttgtgtgtagtattcatggttattcaatcctccgctttcatcagaacatttctcggcttaattgtaacgccacaactagtttaccctggctgtcgtgaccggcgagaatcagtctttcttgttcctgctcatcaatatgtgtaagtccttcagcgtaaagccatccctgcgttgttttcagaccaacacggtatggacctgtacctgaaatggacccctgcgtatatcgtatggccgcattagtaatgaatgccgatgctggatgttttgtactgtccatgtgttgtgcgtaagcacctgacgtaagttctagatgtacgtataagtcctgatcagcaagattattgatccggagctgaatatcttgaggtttaattggttgcatagcggcctccttgtctaatgtaattgtacgaacttcattttaacataaccagaagagaatatacatggagtgaccctgtcgcctattatagagcgttctcatgatgattcaagtttgaaaacaagaacagatttgcgtggttttttctctttttattcatggatcatatctatattatgaagtgtaggcaaaaacgcccgtgatgaagaaccttaaattttaaatgaatcttgctccaacatgtttggaaaggagtttaactcgacttgaaatctctaatacaactacttcattttggctatcatcaggccatgagctgcatatttcccgtagcgatctttggaacactggccctgtccagcgtaattcctattcctttccttcatcgatatgatgccattctgctcgtattgcttgctgtgcagtacctgatgtatcgaagcggcttggaaaccaaggatgaaatcaaggtcatctgtgtatttcacattattggcctggtgctagaaatctataaagtatggatgggatcatggtcataccctgagcaagcatacagcaaaatcctgggtgtccctctttatagtggattcatgtatgcaagtgtagccagttttatgtgtcaggtgtggcgaagactgcggatggacatgaccggatggcctggttttgcaccttcgatgctgctcggagcagccatctatattaactttttcactcatcattttatgcccgattttcgctggtggctgacggcgcttgtatttattgtcttctggaaaacctggattatttaccgggtacgagcaacgacctatcgaatgcccttatcgcttgcttttatcattgtcggattcttcatttggactgctgagaacgtcgctacatttttcaatgcctggaaatatcctgatcagcatgatgcctggcaactggttagctttagcaaaattagttcgtggttcctgctggtcatcatcagtgtcatcatcgttgcgcagctcaaatatgtgaaggccaatcgaaccgcagatgattcaaagtccaggtaactatttattctctaaccgtaaaacagcaacaatcttagactcgtacctaaagtcttcgaatgccgctgttttttactggagttctatttgagattattcaataaataatgagccaaagccatctgcctcttcaatgtctttgttgattaagaggctctccttttcatcgtatgctttgatcgtataaggaggattcgctgatgaaggcaggaatgcgtaccagatttgttggttctcacctgcatcaaccagcttcacatcgaaagtggcgggctttccattttgcttgatttcaacagttacacgtttgatagtggagtctataatgtcaccaaataacatcggaaacggggccgatattttttccaatttcggtatgctcatataattcaacgcaaacttggattcaactgattcattaatggaatatcctccaccccatacccatttccatccgaaaatgttcttgcgggtatactccatctgaagattactgttgttttcccgaccctttttgtgcgtaaacaaaatcatgcccccgtccacagcctcctgatgaatgaattgggaggtataagattcacctctaaattcttgaacggccccttgaggactgttcgctataggaatatgtataggttcattcaatccccaaactttggatatccgttgatcggctagcccgccagctcgttcattcatatacatatatgccaagattgacaggggcgatagtaaaattaccattgcagtgattagcagaattctcctgttacgcttgattatctccatgtacactccttatgataacgatgaaatattaaatataatcactcttatattaccataattagcatatgagttcttgttaagtataattcggacaatcaaaaaaggccgccattggcgacctttcaagtcattcatcgaacctattctcccagaaagattacttcggtttccaattcaacttggaacgtatcatatactttcttctgaataaattggatcagatccatataatcctgggcagtagcgtgatccacatttacgataaaacctgcatgcttcatggagatttcagcacctccgatgcgagtgccctgcaagttacaatcctggatcagtttaccggcaaaatgtccctcgggtcgtttaaatacacttccacaagaggggaattcaagcggctgcttggattctctcaggaacgttaattccttcattttgcttgcaatatcttccttgtttccttttttgagcccgaattcggcctccagtatgatatagtgatccatcttgaagagactatttcgataaccaaacttcatctcttctcgcgggatttccaacactgcgccgtctttggtgatcacagtcgcacgttcaacaacatcggcgatctgaccgccataagcacccgcattcatgtaaagtgcgccccccgtgctgccgggaataccacaagcaaactccaaaccggtcaagctatgctccaaagcaagtctggatacatcaatgatatctacgccgctttgcgcaatcatgctgtcctcattcactttaatttgatcgaagtggctaagagaaatcgttactccccggatgcccccgtctttaataatgacgtttgagccttttccaatgaccgtcagaggtaactgatgtaagttggcaatttccacgattttagtgatttcgtctatcgttgttggatggatgagaatatctgcgttgccacctattttaataaacgtgtgattttttagtggttcattgaatttcactttttccaaaggtatctgatgctcaaaaatattcatgattttctctccctgaattcataaagaaatgattgcaccatcgcgaaaatgagatgctccttctttattatatgctaaataggagattttgtttgaaattatgttgttttcattataattaatcacattctctttagattttgaacttttcgtgagttcctgcatggaagcgagctgttgctctgttgccacaactacatgattatgattatgagagttctatgtctgtttgagtcagcttggctgatagctcccataaacgaatagcttgctcagggtcgatggcatacttcttgaccccatagaaacctccatcctctggagccatttcactgatgtcacaatcctcacagtagacaccgccttttccctcaagttgaggagaagttgctgcccagacttgcgtcgctgccccctgctcaggtgttttgaacgcagggttggccacttgtccagattcatcaatccagcccagagcaatcatttcctcttttggcatatgacgctgtagtggtgtcataattccgcctggatgaactgagaaagcccgtacgccgtgctctgcacctcgacgatccagctcaacgctgaataaaattgttgctgttttggactgtccatatgcagggaatttctcatagccatgttcaaattggatgtcatcccaacgaatcggtgagaaatgatgtcccgctgatgccaaggaaacaacacgtgctcccccctgacttgcgagtgcaggccataacagattagtcagggcaaagtggcccagatgattggttgcaaattgagcttcccagccaggaccaacccgcgtctccgggcaagccatgatgcccgcattaagaatcagcatgtcaatgttccgatcactcgccagaaaccgctcggcaaaagcacgaacgctggataaatcagcaaggtccaattcatctatttcaacaccttccagacccgaaagtgcttccttcgcaaccgctggacgacgcgcagtcaccactacacgggctcccgctttcacaagcgcacgtgtcgtctccaaccccaggccggaatatccacccgttacaatagcaagctgtcctgacaagtccagttccctcaatacatcctccgctgtactattatggttgaagccagagtccattttatgttgtaaagttctagtattattttcctgtgtcattctgttcatctccttagtaatatttctacttcttcaaagtctacaccctagagcgtactctaagtcaaatggaagtgaatacatcacctgcaacttctccgtacaatctgtaaacgtaaaaaagccgccagttggcgactttcgttgaaatgattatagtcatccacgttacgaatcaccctgaacggtggataacgaaacaaggaccggactggcgaaatcagaggcctcttctccttttggattatgaagacggaatagaaatgcttcctcttcttctgatttccagaccatataatcgctaatgccttcttcaccagaggcctgaagataaagcttggcatgaccaagcgggtgttctaccagttctccactataatcagataccttaccggcttttactaattcttctttacctgctgtctccagttctgccagattataatccgaaggcagtggttcaatatccacataatagtcagcgttactagtcagtgacagacggccttgagcagcatcaaatgtgaatttctcgaatacgtacaaggaaaatccttctccttgttgcaaggtcgcctctagtgattgattgccatctgcggtcaacatttcaaaacttgcggtcagtggacgctccgtttcatttgcttcttctgtttcagatggttgttcattttctgttgaaggtgctggagcaggttcacctactggcattgatggttgagggctaggcaaaggttcattactaccagagcaagctgcaagtgttagaactataacgattaaggagatactcatcataataaaacgtggttgaaacatcaggttcattccccctgtctatattctgtgcttacatgttattacccatggctgagactcggaatccataggtccaacctatgagtttatccataatcagtatttcccttgatcccttccagtttgtaaaatatggagaaaacctaaggagtgatgagcacatggaattctcagtaaagcagctgtttgataaggtagcccaagattatgatgtgcagcgaaagcagcttatcccttgttttgatgatttttatggaatggctctggatctaatggaaagcccgctcgattctccacgtattcttgatctgggtgcaggaacgggactgctctccggattggtcctgcaaaagtatcccaacgcgcgattaaccctgatcgatattagtgatcaaatgctcgaaggagcacgtcgaagatttgctgatgcaaaccaagtacagtatgtgatcggggattactccaagtacgatttcaccagttcctacgatatgattatttcctccctgtctattcaccatctgccccacgctgacaagaaaaaggtgtttgactctgtacacaagttgttagaaccaggtggatgtttcatcaacgcagatcaagttcagggaagaacccccgatacggacacctattaccgccagcgctggttagaagcgattcatcaaagtggtttgtctgaggaagccatctcggcttcaatagaaagacgcaaggtggatatcaatgccacgctggaggatcaattggtgtggttggaggaagcggggtttcgcgtggcagattgcatgtacaaatacttggactttgcggtattttacgcgcaaaaataaaaaagaccggatttgaagcgagttatgccctgatccggtcttctcccatgattttattctgaagcgattaattcagcgatgctggcagcttaacgccgagaagtttgccttcggcttggatgatgatcattccgtttgtcttcaacgtcgtgttgtgcagatctccaccggtggagacgcggaagaccgactgacccgacatcatgttgaggacaagcagtgtgccgttacgttgtgctcgatacattcctttaccgtaaacatcaatctgagaaacgggggcatcaccatgccactggacctcttgaccattagccagcttgatgcctgtaagttctcccgtgtttccgtttttgaagatcaacctttcctgtgtaacgccaagccataccatattttcgccataaggacggtgaaaagttcgaagtggcgcggttcccggattacttgaggtcaacggatactccgctatcgcatccccttgtagaatgtatagtttgtctttattggaaaatatccctctatacccattcacatacggtggatcccccggcatggtccacttatactcctgacttcctttcaacacaccggtctccagattgtacgcattcactttccatttgcgttctggtgaagactcgtcattttccaacatcgaagaatagtagtccgctgagtatacaagtccgtctttgatctgaatagcttccccctgaccaaaatgaccccatagcttcttgcccgttttcttgtcatatgcattaagctgtaaggatgtaagtgccccttggacaaaaaaggttctcagcaccacaccattagattctctcagatactcagtaccattaccttcacctaatggttcatctgcttcccagcgcagtttgcctgactggatatccagtgcaaacgttgtactccccttaatcacgtagagggtatccaccgttggaatcagagcttccgtacggttatacgtatcaatccaggtggatgtgcctgactgccattttgctttgcctgtcttcgcattcaaggcatatggcttgtgatcaatggtcagtccgtagagaatcccgctttgataggtaatataaggagtcaggtctttgccgtaagtccacagccgtttacctgttgtcgcatcaagtgcaatcaacttcgatccagcaaacgtgaatactttgccttcttctgcgatggcattaactccaacatacgtctcgttcatattcagatagttatctactttcgctgtccaagaaggtttcagttcaggtacagtgattcgttgatacgaataccagttacggatggatacatccgatgcttcagcatgtgcctgcgatggcaacacgccgataacgccgtgaaccatcagcattccggcagtaatgcctgcaatgatgggtcttcctgctcttcttttccattccttattcatttgacgtttatgtatattgaccatggtaaatcctcctgttattaaaatcctgagatataactacataaacataacgtgtgataggtccaaatagttaccgggttgttaaattattcaaaggaaatatcaaaaaagccgccactaggcgacttcttgataactgtattttttcggtgattagttgcgaacctgactcattaatgaagtttttgctctactttagttggatctggaatacatcaccggagtccccaccaaaaacgataaaaccacttttcgggagtttcgtcgattcctgattggttgctacagagaagtcaaccatttcccctttatcattgtacactgcataacctccggtcttcggagaatccaccgtgatggatttgttacccgagcgggcgtcgatcgcataccaccgggcttgaccgtttgccggaatagtcgtaattccttttttcccaccaaagattggtgtaatcgcatcctcggcaatgtattcctgcccatcctggagaagaatctcggcgccattctttgtgtaaaattgcaaatcaaacgcgtctcttccgttcattacagggatctcggcgatattctctgcatgattggtatccatgatttgcgtgccattggcgtaaccatgttcggcatcaacggaaaggttcttaatcagcatcgatggaagcagataaaagatcgatgttattttttcatccaacgcgtaatatttcgagccgtcacgagctgtccatttctctttcgttgctgcgtcaagcgcattatgatccagtttttgataatcatacgtgttcatcaccgtctgacctataccgggtaacgtaattataccctgaactttaacatataccttgtcattacgttccttcacaaaactagctttcacactgccatccgcacttgtaaaatgttcgtcgcctgtgtacacatatttctgctctggaataattccacccagcaaagcaggcagttgcatctcaccatccttaatcgttatatccaatgtctctcctaccgtaccatagagaccggagtacgcgcttaattctgttggcatcttcactttgtcgggtgacgagaaggtctgatcgggtttaaccttgtcaatgatgccttgatccgccagaacttccagcagcactttgctggcaaacatctgattgtagatggaagatccgccagatgatagaaccgccattgaaatatcatgttcaggtatagtgattaacacggcatggtacaacatggtatccccgcctttggcaagcgcggtaaccccataatcgctgaaaggtgcaaggtcaaccgaatcccatcccaagccataattgatcgtattttgctcatcagatacccatatgcccttccgatattcatgagattgcatggccttcacagcagattcggacagaatatccggtctgttccccattaaaacctctccgaattgactcaattcttctgcggtagagtacactccgcctgtgccgataatgtttgcattttcggtaggcatattcatctcaagtgtaggccaataggtttcggataattgcgctctgtcaaaggaatctagtggtgtcttcgttgattccaacttcaacggctcgctgatgaacttggcgatatattcgctgtagcttaatccactcacccgttcaaccagaatttcaagcaattgaaaaccgtcattggcgtagacggagtatgcgccaggtttggatttcagtttttcggactgaagtttaagcaataactcatcatgattgcgggtgtcattatcttcaaacaacatgctgtttccataatgtgtaccgtaaagaccggatgaatgattcatcaacatgcgcggtgtgatttgagtatagcgcgcatctgccattttaaagtccttgatatacgaagtaagcggctcatccagatctattttaccggaatcaaccagcttcatggcggctgccgtaacaaccattttgctaaccgaacctatgccatacatgctatccttgtctattggcttctgtgatgccttatcgtgcagtccgacactatctgataaaatatattccccttcatccatgatcgcatattgcacactggtgacaccgtagttttgcaccatctccttggcgatctgctccgcccgtgcctcaatcgtaccgctgttattcgcctctgctctgacatctgccagcggtgtaatgacaagcaccgctgtacataaaaaactaattagtttcttcatcatatgtcctccctcaaatgttcttatgaatgaattcatcatatccgggaagagactgttcgaacgcaaacggaccctgaatggaaaaaaacaacccctgaacggcaggttcagggattgtcggtgtggaacggaagcacgaccatgttgttaaatttccgatgctgatgctcaatactcatatgtccaccatatttctcgcacattcgcgatatattggttagaccgatcccatggtactccggattgggcttgtcacttttcaagtcaacgatcggttgctccacatgattcataatctggatgaccagtgtagatgatgtggagtgaatggcaatcaggatatatcgatcctcagcctgtctaaccttcttggaggcctcaattgcgttatcgagcatgttacccagcaccacacacagatcgtaccgatcgatctggatatgctgcgagtggagctggattttggtgtcgattttgatcccgtttgcctgccccatagccaaggtatttgtaacgagtgcatcaatgacaagattgccagagttcacccgctgatacgcaccttcaatggtatttaatgttgacttgatatggtcacctgccgctgccagttcgttacgttggatacattcatcaatatacagaaactgctgattgatatcatggatgatggatttaatgtttttgaaactgtgaacggtcttctcatagttggcatcctggtagtccatctgacgctgtaactgggtattttcatgcgcaagctgtaccttttccaccatgttatcgaatacatatacaatgaacacgttgagaaatagcgagcctagtacagaaaagacgtagaatatgtttttttcactatatatggaggccacattgatctgatagatcgtaataatgggtacgataagaaacagcaaataataacgataatgcacggcaaaacttctgcgtttagccactaaacgtacaatttgaataacaataaacatgatactgcaaccaaccagcattaccttggaaagaatccagtggtcttctccgttgaactgttcccatgagatgaattctgtggattccaaaactccgagaatatatacagctatcgtatttgccattgtaatcagaaccgcatacaggatggtaaaaacaagcttgattttgaactccacttcataggactgtgccagactgaagattaatagcagagcaactgcagtggaaacgagatcggagaaggaagatgccaaataaaaataacccaacatgacaaataccataaaatagatcgctctgcgcggctttcgtctggacttgcccaacacagaatcaaaataaaaattcgcctgaaatgccataagtgaggtcacaaagatgatggaaaatatcatataggtacccatatcattgaattctcatgatcatgtatttggtgtaggcatccttgatttctttgaccttggatcgacctatgggcagttccgttccatttaacattacgacttgggtaccagaaaacttctgaacatgcatcagattgatgataatcgagcgatgaatctgcaagaaaccatggtctttcaaaccggtagcataactggataaaatacctttggtctcatgtacattttcctgtgtcacaaaattcaacttgttcttgattgttaaacttttgacgacctcaatccagagaatatcatcatatttcagcagcaattcatcatagtctgatttgattagtacatactttttgtccaatgcctgaaaatattgacacagcttaatcatcttttcctcgaaaacttgcggctggattggcttgatcagatattgaaaggtgatgacatcaaagctctccaccatatattccgggtaactggtcagaaacataatctgtacatccagaaacttcatgttcctgatctctttagcggtctgaatcccgttcattccgcccatctccacatccaagatgagaatattgaatgtatccccaacctctctgtagtgtgagagcagttgttcaccagatgtgaataggctaatttgaaaatcaaaattggtttttagagataaggagaccagcatggatttcacacgttctcgttgctgctcctcatcatcacagattgcaatattgaacatgggggaacatccgcctttcatcgacatcgactctgaatttcactctcgaatatactattttagcataggtttcggagtcgaatggggatgaaatgcattattccgaccctaaaacgcagatcaacaaaaaaagtcgccacattggcgactcttgagcttgtaaccttctccagcattcctatgaaaagtccagtctgttattttgtttttttggggaaagcatggcggtaataccgtattaccttgcgatacatcgtcttgtcctttaattgattgaatatatatgggtcaggtttgacattcacttcaataatccagggtttcagactgtggtcaaggccgatatccacaccaatttgcttaagatgcgggtacttttttttcatatgacgagctatgcgcaggctaagctcattcatctcttgaatcagttcatttctgcgtttggtggatgcatgtgattttagcagcttgtgaatatccatcggtgtaccaccactatgataattggttacgattttctttggatgacccagtcgaccgatgattccggtagcttcccaatgtttggtcgggcttagctgtatcatgacacggatgtcaaaacgtctgttattgtgcttaagcagatggattcctctctgaatcagataacttcttttattcaccagacgagtcagactgttataaaacgattcaaagctgtcaaacgtcagacgtttttgctcgatctgatagacaaaatgttgctgactttccatctccgccttaataacacccatcccgaaagtacctctctcgggtttgacatagaccattccatatttgctgatcatggatttcagattcgttttgttatatttctgtgtgtcggggataaacggtttaattaattcattattaatgatcaattttgtttttaaccacttgcttcttaacggctgcaacttatcaactcccatgtcgtaaactctcccttcagcaaccgcatcaaagcctgctgtttgatcaagatcctgcaagcattatatgtaataccgataaaggaaccctcaacaaaagcccctattcgtaaaaatgtatatttgcacatgccctgaccaaaacacttttgcacacataccatataatgagtcatcacgatttgtgcaaggagatgagtagatgtccgtccagcctggaatccggttgaacaatgcgcctaagattgatgttcttataccagcgatcgagaaagatttggctacccttcccctcgtcatcgataacattcgccgttatgtaaaacatcccattggaagcatatatattgtttctccggtcagcaccaagatcagaaaactttgttcccttaaaaactgcatttttgttaatgagcgatccgtcctgcctataaccaaaaacgacatacactaccagtcctcccgatggaatcggtcaggctggttatatcagcagctgctcaaaatgaacggagattccattgtgaaggcaaagtactttctagtcatggatgcagataccgtactgattaaacctcattcatttcttgtagaaggcaaaacagtcttttactgccgtgactggagccagccggaatatttcaatacctaccgcaagttgttaggcatgaaagctccgcgtccccgctcttttgtcacccattatatgctgttcgacaaatcgaaactcgctgccttaaaacagaaaattgaagcggttcataagctgccatggtacaaagcgatcatatctaatatcaataagaagaaacagtttggtttctccgagtatgaaacgtatgccaattttatgtatacgaaaaacccaggcagcatggtccttagaagttccaagaataaaagtctgaatgtgaacgcttcttcgttaaaagagcaacaaatccgcaatctggctcttaaatatcgttctctttcctttcataaacggaaaatctatagtaaagctccctgagcttaaggaggaagcccatgcatatcgtactgctgtgcggcggctctggcaaaaggctctggccgttatccaatgagcttcgctccaagctgttcatagatatacttccatcacccgctggaggtagggaatccatgatcagcagagtatgccgccagcttgacagttcatccctaacggattcaacgctcattatttcacatcaggatcaggctaatattacggcacgacatactcaaggcaaaataccagtcattggggaaccttataaacgaggcacttttactgcggcggccttagcgacgttatatctgcaatccttccgaatggccaaagatgacgatgtgatctgtatcgcgccagctgatgtgttcgcaggtgaagattttttcagcaacttccaattactgccggacatattgaaacattctcaagccgaaatcgctttaattgggacaaggcctacacatgcttcagaacagtatggatacatcctgccgggtggcgaagaacgtaatgcttatgcgcccataacacaatttatagaaaaacccgaagcctccattgctgaaacgctgctacaacgtggggcactatggaactgcggtgtgtacgcgttcactgtcgcgtttatgatatcccatattaaaaaaatggggcttccggttcattatgatcaattgtcgtccctgtatgaagcgttgcctgaacggagttttgacaagcatgttgcagaaaaggcgcagcgggccgtagtcctgccttataagggagtatggcaggatatcggaagctgggatacgctgtgcgcacagttagatacccatgtaatcggacacggtggaatctcgggttcttcctccgattcctatattattaacgagcttccctaccccatccaagtcattggtgtgccaggtattatcgctgccgcaagtccggatggcattctcattgccaacaaaaataattcaaatgaaattaaagctcaattgggtaacttgccattaaaaccgatgtacggtgaagcaacctggggcagttatcgtgtcattgagagttcgttagacgatgagaatacaactgtaaccacattaaacataacggttctaccgggcaaacatatcgggttgaactggcataaaactgggtgtagagcatggaccgtgcttgcaggcagtgggcaagtgcttgtcaacggaaaggtcatgcaagtgagtatgggcaatcagttcgtgattaccaaggaaagtctcttttctattctgtctgaaaccaggatggtgatccttgaggtccggatcggagtaacagaggataaagacaacatactttttgaagaagaagattggaatgtaatcctaaaaagtgcaggttcatctaacgtttaatgggagaatgaaccgattcaatctgcatgtcttatagccccttccattcgcggaaggggctcattggcataattaagggaaacctgacacttcttctccctacatcttagttaaacaacttgcgaagttcctctacttccagacgtgcaactggctggtaagcggaactttgtacataacgctggaagctgtataacaactgtctgccctccaatgtagtcatcagacgctccagattcagtgctcccatcagcactctccccttccggacccgacactccatcaacaggccgagcttgtggtttcgctcaaaattatcaatggtctgcacgatcggattcaagtctttatccaactcatccaagatgatcgatgacgactcggacacgatgctccaccacggataagttgagtgctcctctgtgacaaaatgttcgaaggccggatgatcctgttgaattaacaagcccattgtgcccacaggaacttctcttttcatattctccgagatggatcggaacatagggtaagaccagaaatcggtgctatagaaaccttggatcgcgtgttgaagctgattgggattcgggaaaagtaaaatatcctcgccctgctcaagcagcgccaacgcctgttccgagagttcggtaaatagattcaaaccgctcaggtccacttcctcctgactcgggtagatccacaggtcgtaagacttacggatatccgtgcccggaatggacagtctaagctccactttggtcatattggagacttcaggaatgcgaatgctgagatccgcgacattcacataatgttctccatgggtcgctggcaggtctgctttcccttccaataggacgcttccttcgatctgctcgctttgaatttcccacttcagatgacgtccgtccaatgcctgtctgcggaagtaacttagttcaatgcgtgcttcgaacaattcacccgcttgataattatatttggggaatctcgccaacaacacagcgtcggaacaaaacgttctccactcctccggtgtaatcatgcctttggaatccatgaatgcgtccagtacacccaccagcgctgttccctgaccactgaaatcctgaagatccagcagctggaacccggctagttgctgcgaacgaaaagcagcttccagttcttccttgtaacatgcgaccgcgagtttaccagaagctctgaagtatgcttccgcctgatgtcccagtcctttggcattcagacgctctcgaaacacttcgaaattcttggctttgagagaacccgtatacttgttgatctcttcgaaattaggaaacgtggcgtactgtccaatttcatgcgagatgattggtacgtgtgagacaagttggtcacttccagcttcggcctgcactgttttggaacctgtcccatactgaatctgaatctctttgtccccagtctgaccagaagggtcagcatcgctgccttgctcaggtacaatgtttgaatcgtaatctttcaatgtatttggcaggtcggtctgcacgtgaccgagcggagcatcacacatcgcatatgaacctctgaacaggcgctctttggagaaacgaaccccgcagaagaattcactttcctccagaatgtccggcacaaactgaaagttattcgaaccttcggtgtatagatgacgatgatcatatgctttgtatgccttcaggatcgaattcaatctgtccttgcttccccatagttcattccccatggacatcatgacaaacgaaggatggttaccaaaagcacgcagcatcgcaaatccttcgctaatcaagtaatcctgctcggcttgattatgcccatccgaagattcatccgtaatggttccccagaacggaagctcaggctccatgtagatgccgagcagatccgctgcaataaaagcagcctccggaggacaacaggtatggaaacggtagtgattgataccgtaggacttggagatagcgagaatacgaatccattcatccacatctgttggcgcgtatccggtgagcggaaagatcagcccgtcatgtttgcctcgaagaaacgttttgcgaccattaatggtgaatttgtctccggcagcccggaattcccgtaatcccgtccatacttcggtggaatcaagcacttcgccgtcctgatcttgcagatgaatatgaagttggtacaggttaggttcatcatcactccataacatcgcatcttcaccaatcttatacgtcagctggatttcctgcgaatccggggcgaaaatctgttcctcggtcgtatgaactggatctgcactgacagtaacagctgataccacgattcgtactccttgcaggtcaccaacaagtgctgccttgatctcgaaagatcgagtcgcaagatcgggatagacctgaacattatccaggaaaacacgctcgaaaaattgaagttccaatttcccggtgatgccgttccaattcgtctgtgtgtcttcggatgtaaggtgaccccctttggttggataattggtattgtccacacgaatggtaattgtatgagtcccagcggttagccctgcctcaatctcgtaacggtgaggtgtgttcagactgttttgtgttccccattccaccccatcaatccagactgtggtaactcttgttcgttccagatgtaagaaacaacgtttgccagccaagtgttcgggaatttcaatctctcgtgaaaaccaggcacaaccctcaaataagtactcatccgtcagcgcaccgattaacacattctcgtttttcttgcccttggccgcatgagatgtagtatttggcaatgtaataacgtctgagaaattcagaccacgttccaccttatgttcatcaagttggagtttccatatgccttccagatttattgcttctatcatgatagtgtccccttttagattcatataatcgatacaagtaatcgcttccaagtaacagaaaccgttttcggataaaatcatacctgtattataaacttgattgacgcccctcgcatagatcatttacaaataaaaaagtcgccaatgctggcgacatcttatggatacatatcctgtatcctgaacaattttaaaatatggtgggaaccatgcccccgtccattcggatgggagaacctctgaaggctgaagcatatgggctgcatacaaatgcagcgagtctgcctatttcacttggcttgataaaccgctgtaattcggactgtggcagattactcttcataaagtctttctctttttcctcaaaagtcagtgcctcatcagggtatatgccctcaatgatctcacgtacgttttcagagagtgtcggtcctggcaggatcgtattgatcgtaacctcggttcctgctgtcagtttggacaaacttttggataatgacagcagcattgacttggtcatgcaatactgaggcatctggcctgaaggcataagggcttcttcacttgcaatgaaaataatacgtccgtcattgttcttcaccattttaggtaaataaaattgagacaagccattggcagcaagtacattagtacggaaatatttctcccacacttcatcatttatgtcttcataactcatgatttcatatatccccatgttattgattaatatatcaacttcaggaaatttctcaaataaagcttggcgttgcgccagatccacaagatcagcggtagccttttgcggagaggtctccggaaaagtggacttgatttcacgaacggtttgttccacctcttcatcattacgtccattaatcagaacatgaacaccttctcgagcgagttctatagcaatcgctttgccgatcccttttgttgatcctgtaactaaggctgttttctcttttagtcccatatccatcctgcatttctccttcatgattacaactatccggctgcttcttctggacattgccaatagcttcatgcaccggataggtataatattacgcagtctgaaggacctagtaactagcattttgcgccagagttattgccttacacgccaatttgaaggtgtatccccttcccaggtcttgaaagcacgatagaacgaattctggtcttcatatccaaccagaaatgccacttctttgatatcgagcgaaggatctgcaaggtacgctcgggcctgctcacgtctggcctcggttaataattgcttgaagtttgtgttctcctccgtcagtcgccgctgcaaggtacgctcgctcatgcgaagctctttggcgaccgtctggatgtcagggcgctttcctgtgaggctgcgtttcataatccatttgactacttcagtaatggaacgattgctctcttgttcgtccagcgaccgatccagtgccggggtcagaatctccagtaactcctcgttatacgatagaaatggaagactcagatctttccgttctagcgtcagccgattatggttagaattcgtatcaactcggcagccgaagtaagcctcaagggtggctacgtcacccatcggttgggagaactcaacccttttggcagtcaaaggttgtcctgtgcccctccgtccaagttcgatcagaaatgccagcgtaataccaaccagtaatggcggaccttgttgctccttatgtaaccattcgagttcaatgatacattcctcccctgcttcggtaatctgcaaactctcgggaggacacatttgcttgtaacgcaccatgcgattcaacgcatcacgataatcacgagcatggtacatcgccagtacaggcggaggatacttcgatatttcatatccggttgcaagtttgatgatgccctcggcggtgtccccattgagatcagagtaggcctgccagattgcgaagtattgagattgggtcactacaggttgagtgattacttcaagaggcaattgtgcagtgtgagctacgtcgtcagcaccaatccctaattgatgtaaaccagcccaaaagcctggatgaactttaattcgatcattcggtagaagttgcatgtatacagactcctttaacttgttccatttttaattctgatttctaattatagaacggatgtagctaattataaatcttacctcagtgagccatttccgggtaatacgaaaacacgactgcccatgaatggtcagtcgtgttcaagtcaatcattcagtatattatgaaagaatgcacattttgtatgttcagctactcgttcaacgcagttttgatcagggcattcacccgcgagttaaacagcagaccgatatgggatacaagggaaaccgaaacgttgttcgccccgttcaaacgggaaagtaccggggacacaatcgtgtcactggtggaatagatcgaagtcacctttattccactcggagctgtcgttgtggtcaatcgattagccccgccaagggtaatcaacttatccactttggaagcgcctccacggttaagtatgtaatagagactattagctccacccatgctatgagctataatattgacttttgtatgacccgtttggcgtagaacatcatctacgaatcgactaattgctgcggagttcaacagctggtttccttgtttgctaggaaggtcaatcgcgaataattcgtctcttgtccacccttggctacgcaaataactctcaattgctgtaaaattgctatctgaaccggtcaatccatgtaccaatacaatgggtgtacgtgccgtagctgcagaagcctttgaactcgatcctattccagttattgataaggcaaggatcatactcatgaatacaacaagtattaatttggtctttttcacttcattaccctcctgtaaaatgttttatattccatatattacaatctaacatatggaatataaatgaatctttagtctcatttttacagggatgtctaaagtagactacaactaacatcattacattttatcaaactctagttctctacttcttatccttcaacgatatctgcacgtagatccgttgcaatctcaatcattttgggtacaatagcttcgttcgaaatagctacatacagatcccccatgtacaagcgaaaagctatctgtgttccctcaaggtcccacataaaaaagtccccctcgatggtcatggtactctcagctcctacaatgttaagaaccggtgaataggtaaaatcgggttgggattcgaagtagagtttgcactcttccagcgagatggattgttcggcatttctatcttgcatggatcgggtaattcgaaaacgctgattcattgatttgcctccaaaactttattaatatatacatgttacacagcattatattttctcatttccgtcttccactgtcaaaaccatacatgatcgattcttcaatttcatatatactgaatacagtgcacaacgaatttctacaatcaggaggagtcaaatcaatatgttaaaaacggaattcattgatgtactatccattgtctcacataaattatatgattcggctgctaatgtcatggacacggcaagcaggttaattcctgcaaacacgttctgtattgcacaattggatcatctatccaccaaagttctgaacgtatataatcgtgacaaactaattctgggtgaggggctggtcgttgataacgccgagtcatactgtgcacttgtgactgaacattccgaaggcccgttagtaatcaataataatctaacacatccattaaccagacatatggacgcaaccgaattcgtaggtgggtgttcatttgtcggtgtgcctatacataatgagaacggagaaatttacggctccctttgctcatttgatcaggatttctattcctatcaacaaaaggacgtggatctgcttctctccttgtcttcctttttcacgagtcttcttgagatggaaacaactctgcaacagttaaaacaggcggaagagaccgctgcaaaagtgcttgaagaaaagaaaaatctgctggccgttctcagccacgaaatccggacgccaatgaatggtgttcttgccatggccaatctgttgcaatcgaccaggctgagtgaggatcaatcgttatatgttaatgtcattgagtcaagtggcaccagccttctgtcgatgatggatcaaattctggactactccaaagcagaagctggtgcgatctctctggagatcaaaccctatagtgtcactgaaacagtagaacatgtattacaattattttcttctgaagcacagaaaaaaggaattaagttgtacgcagaatataatattaatgatcatctgatgcttatgggcgatcagcacaaagttcgtcagattctaatcaatctcgttgggaatgcccttaaatttacggagaaaggtgaagtatgtatctctactgaggtatctgctgatacagaaggtactctccatgtatcctacgaaataaaggatacgggcatcggcatcccgcaggatcgccaggatctcttgttcaaatcctactcccagattcatggtaattcaggaaagtatggcggagcggggctgggcctgtccatctgtaaacaactcgcagaattaatgggtggcgttgtatggcttaaagattccagtgatttgggcagtcagtttgtctttaatatttccagtactgcacccaccgtccatgcgaatatctgaataatgaatatattattctatctgagtaagataggaggtatattcattgacgcaatttctagatgcacggacatcccaaaatgccgccttgtttaattccatctccataccgattccagtgattttaacgccccaattattcggccagattggtctcataaccgctggagccggaaccaatctaagagtttcattaaaaggaaccatcacggtgcaattgccgcgtgcactttttatagtgagaattactgttgtaagaggaacaatcgcaaccgatccaatcgtatactctggagaccacacatatggtctgagtggtctgcttaaccctgaagtgattgtcttctctgccactgactataacccaccgctcatgccccaattaacgtacaccgcatttatcagcacaaacctgctcgggactacacgcgtggggcccgagagtttcgacgggtatgtcgtttcagattaaaaaatacgtataaccccatatctctaatcggtttcccaataagattagagatatggggttatttatacgattaacataactttttttagagagagctattaatcagaaacaacaaatccatcgaaattctcaggaccaacacggattgtccccagcaagttggagcttacaaaagcagtgtaggttaattgtggtaaaatcggtggattaaaatcattacccgagaatgtaattacttgtggtgccagtacacttaaatcaaatgtggatgtagcagaataaataaccgggtccgttgctaaggtacctcttacaacggtaatcgttattcccgcaagagctaaaggtaattgtacagaaaccgtccctttaaattgaactctgggatttgctcctgctccggcagtttgcagaccgatttggccaaagagctgtggagtgttcaggactaatattggaatagctattgagttggccaaactggcattttgagatgttcttgcatccagaaatgtgctcatcaatctacctcctaatgttgggataggatagtatattcgtagcgtactattgtgtttggacttcttatcattcgctcaacagagtttaatttaatttctggtcggaagaatctattaaacagcaatatggtatatgtgactatattcctgactcttatattggaacgatatgaaaattttgttatgatacatatgctagattactagatattgttataaaagatgattctattattatgtacaaagttggaggagacatacgatgcttattaaacgtgtaggaaaaatcgccgcggttactgtaattgctctctctatccttggaagtacttccaatctcggtggagcctatgctgccccggccatttcagtacacttggatgatgttcccctgaaatttgatgcagctccacgagttgatagaggtgtcacttacgttccgttccggacggtcggggaagccctaggtattgatattacctggaacagcaattcacagactgtaaaagcgacgaacactgtgaaaggacaaactaccgaggtactattacaagttggcagtaccatagcgaccgtaaatggaaaaaaagttacacttgctgcagcacccgttcaacgggaggggcgcgtacttatcccactaagttcgttcagtaaccaattcggtgtacaagtaagctggaatcaggcaaccaagacggtctcccttgtctccccacaacgcgagatgcacttgagagccttctatgcgttgcagtcctttcaagaaaaggaccttattacttccatgaattccgtaacctttggctggagccgcattgatcgtgaaggtcagtttacgctccaaggggatgaataccgtctccctgctgctgcgggtgatattacaccgcagtccatcgttgctgacgcagcagatcagaagatccaaccgcagctcatggtatatgccttggatggaaacggcgaactgaccaaagttctgagcgacagcagtctgcggcagaaatcgattgaaggtataactgctgctgtcgcagagcatggttttggcggagttgttctggactttgaaggactgggctttaagctggatgcggtagaacaacagaagctgctcaatgcttacgtgaaacaattaaagagttccttacctcaggacacagctttatctctggcggtaccgccgctaaatagtgcttataaaggttatgattacaagacacttgcctctattgcagatgatcttatcattatggcctatcagtataatccggttggcaccaaatctcaggtacctgagccaaatagtcttgtggatcaggcgattcaattagccatacaggccggtgtcccaaagagtaagcttctgcttggtatcagtttaagcagtgaaacgccctcctctgttgatgataagctgggtctcgccaaacgttatgacctcaaaggagctgccttctggcgtctgggtctgttccgttcctacaatacaaagatggaagatgccgtgaatgcttctgtgatcaaagagtaaactttctgactggatgcaactcacttaaataaaagaaggaccacacctctggtacgcagagacttggtccttctttttcccatcatctcacttcataaatttatccacacttccaaatataagcttcacaaactgggtaggaccaggcaaacggggctgaaagagaagaatgatcccaattactgccgccactgcagtaattcccgcgctcactattctggctcgtttctctttgctactcttccactctgcatacactatcgcagtcgccagtatcaaaatcccaaggattgagcctagtttcatgcaatcacctctcttctcaggcttgtacagtagccgattctgttcaactttcgtcctcatcaggtatcccctgtggtcctgttgattttccggtacgttctacgtgtgcatctactttgacttccacgtccaattcaggatagatggtttcccagttcttctcttgcgccttccattgattcggataatatctgcggaattcaactgcgaatttgaagaaatcggagcgtagctctttctgggacatggctaaagcatcatgagccaaagatgtgagtttagccgaccattccttttccagtttagttaatacagcgggatccgtcagattggcatccgtcgtatttaacaccacttctcccctggtttggatgtcgaccttcatactccactgtttgtttacaattcgcggcttcaaggaggttttattttcaatgagtcttatcgaaaaagaaccctttaacggctcaaactcaacgggcatgataatgctgttcagttcttttgcaagtagtaatacacctacgcttagtggttctttgaccgtcttgacataatgatccttcttatacatactcagacctttcacatatggcgtagtcgtcagtttatcctgatcgggctccgggggtaagattaacatgcgagacaaaatggcggaactgctcggaccttcaatggatttagccagttcaagcgcagtaacacgtgtacctaacttcagattggccatctcacgcaacgactcagcagaacttcgctccagtggatcaagtaacgcaaggatatctttcgcagccttttcgctggaaaagacatatgcatgctccctgaactgagggtaacgcaggaaaaaatcgatatactcgcggataccgcgtttaccggcttgctcactgatgattatgacttcgcagtggccccagaacatattccggggaactttacgttgcaatcgattcaatgcctcggcaattgtacttccttccgctgttcgaatcattgtaaccccgcttggactgcctccactcccactgctatcccctgcactcgcctttcgcggaatgaaaatctgtgaagtcagttgtacttttccatcttcgtaatctataccagtagccagcacaatagccaggtcgttaatctcgatgcgatcccagcatccactcaaaagcacacaacacaatattggcattagtagtactctatatattcgcaagtgtttctcccccatcaatcaggtgttcgctcaattctttctgaaatgtgcccaccctttcttcagccatgcgatgccgtagatcatagccggaaggattaataaaatgctgatggtatacaagttagctgaagcgctaaccaaactggaaataccggaactgccggacacaacccaataagcaaataccatgcacaggaacgaaagtggaccaaccacaggtttgtagtctcgcaaaccaaaccattccgcggttgatgtagcaaagatatatagaaaaacggaaattttaacgaaaataccgaaaatccagatagcaataataagggattcgatatgttgcaaaaagtccgcaatggttatgtatcttgctgcgatcatgaccggaaatacaaatgtatccgtcaaatcaccaattaaaaacaggcaaaacagattggtaaccgtcattgcagttgtcgtaaatacaagggaacccagcatgacccgggttattcgttttttttcattcacataaggtagcagaaaagctaacacgatatattcactaaaccatgcagcaggtgcagcagcccccgtaataatgggaattggacccttctccataaaaggaaacagctcggcaggattcagttcaccaatcaacaatataaagatcaaagccagcagcacgatcagcagggtaacaaacacctgagcggttcgtccgacaacttcgatcccgagtctgacattaatcgcacatacaacaaccatcgtacccatcacaacaaacaaaggtgtacgcggaagtgcattattgacaatgaattcaccgtattcccgaataatcaagcccgtcaggtggggcaagaaagcgatatatatcaggccaaataacttgcccggaatccgaccaataatcaatacactggattgaatgagcgtttttcctgggtacagacgatcaagtccaacggaaataccaatggcagccaatccaacgattgaacctataattggagtcatccacatgtcatgtcctgcatagtgcattgtaattccaggcacagacaggatagccgtcgcgagaatggcgggaaagaccataaatgccaattgagtcaccgatattttccctttgtcagtcaacatatgtaatcccgctcccttgtttgcttgaatgtagattgttctagtgtggtttgttccttggggatggacgccaccatacatccttaagttccttagccattgtaggtgctaccggtgagagataaggtgttccaaatgaacgaagactgctcagatgaatgacaaccaagatgactcccagcatgacacccgtgagtcccagcgttcccgccagaaacatcatgggaaaacgtagtagacgggtcgcaatgctggcagcataacggggtatcatgaaagaggcgataccggtaatcgcgacaatgataatcatgggggctgagacaattccggcactcgtcgccgcttgcccaataattaaggctcccacgatactgaccgctgatccgacctgctttggcaatcggacgccagcctcacgcaatgcttcaaaggcgatttccataatgagcgcttccaccagggcaggaaaagggatctcttctctcgcccgagcaatactgagaagcaatacggtaggaatcatctcctgatgaaacgtcgtaatcgctacataagccgatggaagcagcatggataaaacaaaaaaactgtatcgcagccagcgtacaaaaacactcatgaacacattttgataataatcttcgggggattgtaacatggaaaaaatggtcactggcgcgataagggtaaacggcgttccgtcaacgagaatagcaaagcgaccttccagcaagttggatacgacgacatccgggcgctctgtcgcaatcatctgtggaaatggtgaatatcgctggtcgacaatgccttcttcaatgtactgactctccagtacgtctcgaaggtttaaatcagcaagtcgtgtctgcacttccttgaccagtttggggtcaataatcccctccatgtatacaagtgaaatactggtgtttgtacgatctcccatattacgtgtatgaagtttcaatgcaggtgtcttgagacgtttgcgcagtaatgacatattcatggtcaacgattctgtgaacccatcccgtgcaccgcgcacggtcgattcagctaacggttcctctgttgaacgatttgcagcttggtatagagggtaagtagttccgcctattgaaccgtccagcagtaacagagcttctccttcaaatatggccagtactgcctgagtagtcgtttcaacttgcttaacagaagctagcggaacttgcgcagctttgatccccatttcctgaatgggggttagtacctgtctctccagccgctccgtatcgcatacaccaacacaatatacgcataacgctgaagtaagacacgcggtttggaatgtatgaaatacaacgtccgagcaacccgcaaaaacggagcgtaacatttcttgatcaatagcaagatttccggttaatggcaagtccggttgtgttatcgctgatgtgtccatgacgcctcccctttccgtaaaacgctccgtccagatattctcagttaaaggtatcctttacttatcagatgggatatatacgcaaaatatagaatgccaaaaaagccgccctcatgagcgactctgatgatataaaacgctattcattcctatgaatccgttgatcttgctctttgcaattccctattttctatttatccctatcctttcacagcacccaaagcaacactcccaataatctgtttggaaaatatagagaatacaataataataggcaggattgagatcgctacacccaaatacaagagtccataatccatcccatagtacccctgcactagcgcaaccaataccggaagtggatatttatccaaggagaaaaataacaccaacggtgtcaggaaattattccaagatccgataaacgtgaatatgccaagggcggcgatcgccggtcccagaataggcagtacaatctgattgaacgtccggaactcaccggcactgtccacccgcgcagattcaataatctcatccgggatgctgctctccatgaactgtttgataaaaaatacattaaatgcgttagccgcagccggcaaaataattgctgcataactatccagaagtcccatcatgctgaatagtcgatatacgccaatcagagccagttgacccggtaccatcatggttgctaacagaaacaggaacaacccgtttcgtcctttgaatttaaatttagcaaatccatacgcagttagagccccaatatacagagataatacggtcgatgttccggcaataaatatgctgttggcaaacccacgccaaatgttgattttggataccatgttcatatagttatcaaccaagaatgagccggggagaaatgtaaacgtcgaagcaatcgttgcattattatgtgtggaatagatgagcatcagataaaatggaataatacagagcactgctagacccaccaacagcagatagatgatgatcttgccaaccgtcagtcgttttgtgctggcataatgctgaatcgctgcatttgtttgttccattgattttgcagtttgcatgaagaactcccctccctatgaacggctctttcgcttggtcatgatgaaggatgcaacagacaacaatatgataatgatgaacaggcaaaatgctattgcagcaccgtaaccaaaacgcgtgctctgaaatgcgacattatagagatacataatactggtcatggctgcccggtcaggaccgccagttccattggtcagtgtaaatggctgatcgaaaatctgaatgcccccaataatagatgtaatcatctgaaacagaataattggacggagcatcggcacgataatatgaatgaaaatatgtttctttttcgcaccatccatctgggcagcctccagcagagaagggtcaatgccctgaagaccagctaggtagatgaccatcgaatagccaaagtattgaaaaaacaaaatggatgatacaatcagacgcataaaccatggatcatttttccagttaattggatcttgtattatgccggtctgcaccaaaaaatgattcagtccgccagactgccagtcaaaaatcaagctcacaagcaatccaagtgatgcagccgtaacgatgttgggaaaaaagtatacggctctgaaaaagtcccgtcctttgagcagcttatcattcaagataaaagccagcacaagtgagattgtgagctgtggaactacagatacgccccagatgaataacgtattaaacaaggttttgtagaacaacgggtcttgtaatacggcgacgtagttaccgatccctacaaagtcaggtgtcgtgatcccatcaaagttggtgaaactgatgtagagcgaatataaaatgggatacagcccaaaagtggtgaaaataataaaaaacggagcaatgaagtagtagccgtaatggtccttgcgaatcgttttggcaaacatgttctatccccccagttatcatcggatgtgtatattcattcgctcgcttataagctaatccacctccagctccggaaatctcaaggtaacatcacgtttgattcgctttacgacttcttccttggtctgaatgtccttattgagatataactggagtacaatcttgtagatatcattgttaatcgtggcatcatatttggtgcgttcgtatacaggtacccgttttgcggcctccgagaaaaactcgaaatgcttttgtcctcccaaataagatgatgagagagacggggcaagttcatcattcacaaccatgttgctggtgaaataatcctgctctttcgctaactcggatagaaaatcgtggtcaaaattataaaactcaataaacttccaggccaaatcctttttctcacttttactgtacatcgcgatataggttccacctgaactaaaggctgacggtccctgggctaaaccccacatgccttcggtatccggagcgtttgccttgaacgtatattgcaaaccccaggttgccccgggatagaacatgacctctcctttttgcatggatgcagcgtaaccggcacttccatcttcatactcggcaagtacattccgctcacgtgcttcacgtacaagatcgagcacttccaagtacgttggatcgataacaagtttgccgtccttcacccaaggtataccatcatatgaattcgatatagcattccaattcgccaatgcatgtactttattcccgctaagttgctgtaccttctctccgatctcgaagatcttctcccatgtatcgatctgtgaacccaccttctcaggatcatcggtgcccagatatttcttcgccagatcccgacgatagtagatgccccctggtgttccctgataacctatcgctctgacatttccctcactgtcctgttcattggcctgaacaaaagcatattgttcctggataagttcattggcgttatacggcgaagctgataaattctccagatatggaacgtcaatcagctctcgaatattcgcattttcaatcataaatacatctggagccttcgaggttgtctgtagcgcagatttcagcttggtgatatagaaattaccagggatgttgacaaagttcactttgatgtcaggatatttctgttcgaatttctcgatggcgtaccctgcttcatccgtaaaactccacacagtaatctcctgttgcttggtttgactcgatggactgaactgacaaccagctaacaacatcgctgcacatacaaatacaatagttggcttaaaccacttcttcataggccccctccttcaaaaaggaaacgcttacaatttattagagtatattgattttggagagggctttctccacaaatattgtgcattaccctccatattttgtgatattcgtacgatgtttcttacgaaattcggagggtgtacagtcattatattttttaaaaagacgattataggagttaacattgttaaatccgtgtccgatcgcaatctccagaatcgtatcctgacggaacaataaagcccactcggacttgataattcgaaaatgattcaagtattccatcagtgttactcccttgatctctttgaacagcttgcagacatggaacttgctgaatttaatatgttccgccacctgttccagcttaatgggctcagcatagtgctcctccaggtattcacagaccgattcaaggaattcaaattttttggatgaagtacatgcccatcctgaagatgaggattcatcggtggtaaccggtactttggtacgtaataaaagtatgatgagatcatacaacctggataccattaaccatcggtatcccggcttctgatttttcttctcggtaatgatgtcatctatatattgagtcagattgctctgacttcccgtattcgagggaataacagttgttttgttgaaaagttgtccgagatcctgaatttcggcttcggtcgtgaaactcccggttaacaattcgagtcggaacaagataatggtcaaatgttcggtccccggcaaaaagcagtgcacatcccctggtttgatcagcagcacatcccctttttccaactcacacacgtggtcgttcacgccaattctggcgctcttaccattgacgagaaccagttcaacctcatcatgccagtgcgcagcataattgaactgatttcctgtatgaattacccgaatgggaaaaccttcttgcatatggcctgtctccaaaaaagtgggtacgcccatcgtatcaacctccatttattcccaatgcaaaatactcctcatctttatattatgcattaatggctactctcctttctttttaagtatttaaaattctatcgaatgcaaaaaactcctcaactcaggttgaggagtcgaacagaatcacgttccacgcattggatgtccagtgtatataacgtctctacgatctctccgttcagcagttggaagagaacatgacctgcaagctggcctgcatccctcttcggctgacgaaatgtggttagaggtggattcatgtactgagatgcaggtatattgtcaaagccaattacggataactgctcaggtattgagatatcatgctccctgaaggcttccaagccgccgatggccatttcatcatttgcaaaaaatacagcggatggcaactctccttcaagcagtttcttggctgcatcgtacccatcttgcttcatgtattgtccgccaattttccattcggggttctcttcgatgcctgcctcctttaaggctttcaaataacctcgataacgatggagattacattccgattgtgacgggccactaatataagctattgtccgatgccctttatcgatcagataacgggtagccaagtaaccgccttgcgtatcactcatcaaaacctttacaatatgttgagcatccagatcccgatccatgacaacaatcggaaaccctgcttcagatgcttcaatcagcaactgatcttgaatattctgagcgataacaatagctccgtcaattcttcgttcgcggatgtaacgatgggctgtcgacttctctccacccaacgaactacatacgatcatatcgtatccatgactcatgacgacggtttctattccgttcaccaaatcggaaaaatacggactggacatgtcatggacaataacaccaatggtttgtgtactatttcgttttaattccgatgcaggaccatgcttaacgtaattgagttgactcgctgcctcaagcactcggagtcttgtcggctcacttacattccctttatcgttgagtacgcaagatacggtcgaactggccacaccagccatcttggctacatctttaatcgttgtcatcatatatactcctcaaagacagtttcatctgtttagttcattatggcagtaacacagcaatacacacgggatagttcactagcattttaacacgtcagtccagtcatgtctcttagcaaaccatcaactacgaaaaaacatattaaagaaaccgaggtgccttcatgagatttagtgaatatgtaataggtcagcgttacgaaaccacatctttggcattatccaagcgtgatattattgagtttgccacaatctatgacccacagtacatgcatttggatgaggaaaaggccaagcaaggccgatttggcagtttaattgcttctggcatgcaaacgatgaatatctcctttaaattatggattgaggttggggtctatggagagcatgtcgtggcgggcaccggaatgaataacattcaattcctgaaacctgtctttccggatgatgaacttcatgtcattgcagaagtcattggactgactcccagacgaaaaggaaatgggattgttacggtgctgctgagtactttcaatcagaagaatcaaaaggtatttcaggcagaattaagtgctttaatcgataattaaggctgagaaaaagcccaaaaaagccgccaattggcggcttttcgtaaatatatcacattgaagcatttttaagcgttataccctttcaatacctgccccaaaatctctacacccttgacaatctgttcgtctgacggggttgagaaattaagtctgatggcattacaagggtctttctcgttcaccaggaatgcatttcccggtacaaccgcaaccccttgagctgccgctgtcttggcataatcaagcattggcacatgtgctggcagatcacaccagaggaacagtccaccatccggttgggtataggtaatggacttacccatatgctcttgcagcttgtccatcatcaatgttgcttttctccgatagacctcacgaatactgttaatgtgccccgcgtaatcatactctgtcatgaacttgtacgccaggatctgtggaagcatagccgtatgtacatcttctccctgtttggcaacaaccatcttctccacgacttcatgtggcgcttgtacaaaaccaacgcgcagtcccgctgatagaattttggaaaatgatccaacatagatgaccagaccctcatcatccatagacttgatggttggcacatcatctccattgaatcgaagctctccgtacgggttatcttccaaaatcataacgccatacttcttagccagctcgtatatggccttacgttttgcaagactcgttgttacaccggtaggattctgaaaactcgggatcacgtagatcagtttcacattaggctccgtttgcagcgcctgttccagcttctcgatatccataccgtccatctccatcggaacaccggcaagctttgcaccggatgcccggaaggagttcagggaaccaataaagctcggactctcacagatgattgtgtccccttcattacaaaacactttacaggccagttcaatcccctgctgcgctccagatacaatgaacaattgatcggatggtttacctgtatcaaaacctgtcttcaagtgttgagtcaatgcttccctgaggggaacatatccttccgtaatcccatattgcagagctgtgaccgggtcatgctccagaatggattgagtgaatgtgcgaatcgcctcaataggaaaggtttccggagcaggatttcccgcggagaatggaattacattttgccccgaagaagccttcagaatctcacgaataatggatggttgcagtgctgcgatacgattggaaaatgaatagttcatcttaaatagtgcctcccgacatttcatctgaattaactctctatcattacattagattctattatacgagcatttcccgaatttccaaactgtctccacaaaattaatgtttgtacgccaaaaaagaggccgctgtcagcaacctctttcgcataagtatggagcaaaattcagcctgttagcgcgctgcgttcatctcggataaccgtgtggccttcactacataagcggctagaccggggatcatccgagccagaccaggatagaatttattggttttggcaaaagccagcttttgaattcttcttgcgcgtctgagcaattgggtgaattcacggcttgcttccagcgtgtaattactctgccaatcggcatgttcaatgtcaccttgcaggtacttgtcagtccaccttgcacacaggagtgaggagcgaagagcaatggacattccgtctccacataagggtggtatcatcagcatggcatccccaatatgcggatattgggaccacggctcaggaacgttggacagatgcagcggcgcaatcgacacttgcgttccatctacaggttttccctcggctaaacgggccgccaagctcacgtttgtcagggatgccgcctgtaaaatatcgtttacagatttgccacttccctggacggtatccagtgtcaacaatgcggcgacattcacaataccatcctcaatcggagaaatgcccacgtaaccaccctcgcaaaaatataactctacccgtgcgggaatctctatcccactgaagtgggacttaacgccaacgtatatggtttggtcccgcagatcaggtgcggaagccatcccgcgcggctttttggtcccatgtgccccgataacggctttggctctgtagctgatccgctcatctccctgtttcacctgaacctcataactggcatcctcaagctgctcgatgctcgttatggtcgctttggtcacaatctgggctccggcctccagcgccttctgatgcaaaatctggtccagctcatatcgacttatgccatatgcaaatcccggcagcggtgcttcgatcactccgccttgtggcataacgattttggcatgatccatggtgctgggtttctttgactggtccagaaggtgaatgtccagaacttctaacatctccttggtttcgggtgacatgaactcaccgcaggttttgtgccgcgggaactcctggcgatccagcaaaagggtccgatgtcctttccctgccagttgcattgcacatgtactgccggcaattccggctccgatgacaatcacatctatcgatttcgacacgtaagatcacctgcctttcgtgggaataacaacagagtatcggaataatggcttccattcataggtcatcgtatcatgattgagacgttgtttaagttccttccaatccctccctgtaaaacctttggctacggaaagaggcccatcatgacgaatataacgattgcgcgagatcatccgtgtagtaatccagaccgccttataggatacgggatgacggtgaatatcattaataacgacaccgtatttggatgctcgcaacatatgagaaaccatatcaaccagttgatctccgtcaaaatgatgtacaaactgggagcctgtcacgatatctgcggaagcatccggcagttgtgtaagatcggcacgctgtacccgaactcggggttcgtcacgaaatagttgtctcgcttcctcacacgcttcttccgtcagatcaaccaacgtaatttccagctgaacaccctgacgatctgcccattgcagtagtttctggttcacatcccctgaacctgcccccacatccagcagggtcagcttattcggcttaccgactgagttccacaacttctctacaccagccagagttgggccaggtgctgcaaatattttgttaagacgtctcagatgtctaagcgcttcacgcagctcctcccctcccagagagaagtcatccatcagttcatcttccttggctcgaatggacaatgttctaaaaaaggacatgatcgtgctcctccatcactgaagataatgagggtacataagtgaatttcatcaactctgcggtgagtcccggtccaaatgccatggctacaccatctgtggaggattgaccctgtaccttcatgtcctcacgcatcgcgttcattacaaacagaatggtattggaggataagttaccatacgttctgaggacatccctgctatactttgtttgctcgtctcgaagcttcattacattctgcacagagtccacgatcccacgtcctcccggatgaatggcccacagttcaggcagctgttcactttgcaataagagacgcagttcctcttccaggtgaacacctaacagttttggaatacgtggggatagatacaggtcataccccagattccccacctcccaggtcatatcttcagtcgaatcgggaagaagcacagaataacccgttcccagactcaaaacattcttgtgctgaggttctggtgtgcccactacacaggaagaagcagcgtctccgaagaatgaagctgcaaacagcgcttcccgatcttgtacgggctgaaaatgaatggtgcacaactctacacagaccacaaggacctgtgatccgggagctccctgcacgacatctcgtgccatctggatggctttcaaccctgcggcacaaccctgaaagatcagcggcagtcgattaactcgggcagacaaacccaaatgacggatgagcataacatcaagacccggcagatattgaccggtgcagctgaccgtgatgatatgtgtgatgctctttggagatacgcctgaatcttccagggctttctctgccgcctcaatcccgagcggaagcgcctctcgcttgtatgtattcattcgttcttcggttgtcgggatgtctgatcgctcacaagagggcagataacggcattcttccagtgaacccagatagctcggttccacggtatatcgtgtttcaacaccacaggacttgaatattcgcttggcaaaacgggccaaatctggccgatcctgaagagaagaagcgattaattctgcaatatctgactgcgctacggggtgagcaggtagagccgttcccatgccaagaatcgcgatatcggatggactgttatattggttcataataagcctcctggtattggtcattatttcctctaatttaacaactcttacccttaacgatatcgttataatctcaataaggctcctaatctagtttattaacacatgcgcaagctcagaagcttggtttcaccaagccattgaagcaatcacaccaatgaaaaaaaaaagccgccattaggcgacttcaaggtaaccagattccttctaagcgtcattctgatacacgttatttggaaaatgcttctctgatcttgtcactcatcaggtaccaggcatcctcagccatctggagatccccagaatgcgtaaatccatgagcggctccctcgtactcattaagagtcaccttcacaccgcttgcttccagccttgctgcatatgttcttgcttcttgggccagtgaatctttctccgcggtaataatcaatgctcccggaagtccctctactgatgttgcgagcacaggtgaagccaacgggtcttgcgcatcttctgacgtatgaaggtacatggcattgaacgttctggcgatatcggctggaatggcttctgcaaaactcggtttctcggccggatctgtagccacatccaacacggcataatccataatttgcagaacaattggcagctcgctacctcgttgctgattcagtaaacacactgctgcagcaagattaccaccagcgctatgtcccccaatagcgaatagagacgggttaaccgagaaggattgcgggttggcgtggacccactgtacaacgtcgtaacattcatggaccgccgttgggaacttgtgctctggtgcaagactgtaatcgatattaacgaccacacaatcagatcgatcagcaatcaagcgacaccatggatcatccatctctgcttgtcccaagatgaaaccacccccatgcatattaaagaagaccggcagaggcgcggaatgctccctatccggtgtatacacaagtacacgtgtatcccctttagttgtaggaatcatgacttcttttactgtgaccgcatacgtggaactgggttgaagagctgcacctgtaccgacgacattttgacgcatacgttgtaccattgccaattgttgttgttgatccatagatatcactcctttagtggattgccaatacgctttcttccgttgtcactttaagtatagatgacactcgtctattccgtcatgtgcaattcatttgatatgtattgatcaacatgctgaaacgtcaaccaaaattaccttcccctgctcttaatgcttcaatgttagcattcagtaccaggagattggtttggatccgtgcctgtttccttttttttgtggaacatcatccagacccccatcaaacaaaataaaacgctgcaccccatgccaaacaagctactggtttttaatgcaagaggtgagccttgcatggtaagtaatgtcgcttgggtcaccacgatggataccatcgcatcagtgaagttaatcattttcaatgtagatatgatcgggttatggagatgacggttcgcccaggtaccatacacggcaaaaaccagcttggtaaaagcaactgtagatacgatatacacgatgttaccctcatatatgaaggcatcgccgattagatacattcgcaggcagaccatcgaataggacgcgcctagtaaacacaggaacagacctccacgcttataaaccgtaagctctaatctatatctttcttcgggagagtccattctcttggtaactgtatatttatggagcacttgtccttttgccacacacagaatcagataatatacagcatttgtaatgaaccatcccgaaagcagatatatgcccaggattaacttgcctatccctgttacagcattgataacaagggaagccacattaaacaaggctgttcgatcttgtttatttccaaggtaatggaaccaaatggacttcaaatatgtcttcattttcataggatattcattctgttagagaagcagaccattagccttttcacctacctcttaaatgtcaataacatgatgaatgaggtgtagagaaagtggtatacgttctcctcattcggccaaagattcccgaacgctttttggaagggatttgacaaccatatcatacgagtgatcgatcatgacatagacatcttcatcggacaatgaaccatccagcgtaatggtattccagtgttttttgttcatatgatatcccggttgaactgcttcatgctgctctctcaggttctctgcaataatggggtcacattttaagtttaaacgacagttcttttctttgttttcaaaaataagcgcgaacatcttacccgcaaccttaatcgcgactggatcaggtccgaatggataatccttggtcgcaccttttttcttcaaactgtatttaatcatcgtatccttcaagttattacctccctttcaccaatggacgatataatgataccgaatgtaagttcgtatgtaaataagctcgttgcacataaaagcacataataaaacctcctccaaatgaatggagaaggctttatctggatttatttaactcttaattggctctatcattcctagttttgctgctgcggctgaatgagccatggttagatttactgctactgctgtttgatctactgctattgggtctaccgtcgtttgaacgactactgtttgatttaccactcttggcaaaccattcggacttcggcttgcgtgccgggttagctttggacttcgccggtttgcctgcagccgatttgttgaacgaagggttactgcctgatgctttgctagttttatcaaacataggtacacctgtcattggatacggatgacctttcacttcaggaatcgtctttttgattactttctcgatatccttcaggaatggaagttcgtccttctcgcagaacgagatggccatcccgcttttgcctgctcgccctgtacgtccaatacggtgaacatacgtttccggaatgttaggcaggttaaagttaatgacatgtgaaagttcctctacgtcaattcctcttgccgcgatatccgttgcaactaatacacgtgttgcaccactcttgaagttgttcagtgcccgttgtctctcgttctgagacttgttgccatgaatagcctgtgccgtaacattcgctttggccaaatcacgtgtaacccggtcagcgccgcgcttcgtgcgtgtgaacaccaatgccgtgacgatggatttatcctccaaaatttggttcaacatatgttgcttcttgccgttctccaacaaataaatagactgctcaatgcggtctaccgttgaagataccggtgtgatttctactttgactggatcaaccaacagggttttaaccattttggtgatttcaggaggcatcgtagctgagaagaacagcgtctgctttttgttcggcattttggcaatgattcttttcacatcatgaatgaagcccatgtctaacatccggtctgcttcatccaaaacgagaatctcaaccatcttcagatcaatacgtttctggttaatcagatcgttcaatctgccaggtgttgcgataataatatctgcaccttgattcagcgcccgctcttgcactttttgcgaaacgccgccaacgattgccgtacaacgaatgtccgtataccggctatataccttgatgttatccgcgatctgaatagccagttctcgtgttggtgtcaaaattaatgagcgaatatgtcgtgtggacttcgatacttgccctttggatctttcgcttaacaattgaatgatcggcaccgaaaatgcggccgtcttgcctgttcctgtctgtgcacatcccagcagatctctgccagctaatacagctggtatggcctgttcctgtataggggtaggattagtatagtttgctttgcttaacccttccataatagaggggataatatttaagtccttaaatgtcatgttgtctccttcatttacgcacatctatcaatatgacgcatcttttatttcacacgtaacgtataaggataccattaaaaacgtaatttgtacattatctttttaaaatcactttgtttaactgaccaatttaagaccaactgccgatccgagcaccatagcgataaacagaattcgaagggcatttcgaggttctccataaaacaccatgcccagaatggcaccaccggaggccccgattcccgtccatacggcatatgctgtccccatcggaagagtttccattgcaatggacaggaacaggaagcttaaaccaaacccgcctaccaatagaaccagtgaaatgagattacggtctttgtgcaacttgtttatcatcagcactccgatcatctcaaatatacctgccaagataagaaatacccagttcattatagctgcacctccttattcttctctttgctcagcattttaagaccaatcacgccgagtaaaagtacaccaatgagtaccatttttccggtttgaacagtcgcattaaacagaacaatctctgcaagtaccgtaccagcggtacccaggccaacaaatacggcatatacggttcccacaggcagtgtccgcgaagctgcaatcatcaaggagaaactaatgataattgcaaccaacgtaaacccccattccagcagaccactggcatgtttcaatccaatgacccaacctacttcaaacaaagcagcaatcacaaccgacatccatgttttattcattcttgtaacactccttctctactacattttttgtacaacccgcaaggttcattagcgtaaaaacaaaaaaagcccgggaaacaaactgcatgtagcagttcatctcccaggcttttatccctccgtggcacaaccaacaggttgcgggttttctctcggaccagaccgacacatccatcgcggaaccctagaaaacctgtttttattctaatgtgtctccaattatacacacttccactatcttggcaaccccgtatatgcaagcatgccatttatttgattatcaaacccattaatcctacaaatgtggcggcttgatgtggtgaaatcacacaaccgttgagatcttccatggtcagcaccaaggagtcaaattcgcaatcgctaagatccaaatccttcattttggtccccgttaaggaagcttggtcgatgttacattgactgaactccattttttgcagtgccagataggcaaagtccgcaccaatcaaggtacattccgagaaggagacctgtttcagatgggcaaaacggaaattgctgtagtcgcctagaccatgaaggaaactgacattttgcaatcggctattggaaaaatcagttccgacaaacttgcagttatgccattcgatccggtgcatgaaggcaccagagagattgacattggagaagtcgcagtgttcgaacctgacatcggtgaattcaaattgttccaaggtagactccgagatggtcacatgtctaaatacaacattttcaaaggaaaccttactcgcttcctgttgatccaatgtaatgttctcgatcagtttgtgtttgtactccactttggattccaggaatgcaatcgtttccggttcgagcaactgctcctgaatcttgggtttgtccattttcatcccgtattcccctattccttaatagctacaactcgcagtcggcttctgtccagataccactgtccatcccgcatcagttgtggctgtacttttttctcaactgcttccataataacatcctgttccgcaggtgtgataccactgaataaatactccgcgaagctggtcaaccactttctggcacctggcttgaacggggtaaattgatccacatgctgagccagactaactcgaaatccgtgttgctccagaagattagcatattcgccaatggtcgggtgataccacggattccgtccttcccatttgtatccacgggcatccagttcttcctgtaccgctgtaattaatatagccgtgttaccatttgcagcaaactcagccacgaatcgcccgcccctcttgagcgctaactgtattgattgtactacagctggagcatcctttatccaatgcagaacggcatgagagaagaccgcatcaaacggttcttctgtccgataatgacaagcatttgctacttgaatattcatatcagggtatttctgtttagcttgcctaatcgtctcttctgaaaaatctatacctgttggcagtgctcctctggctgcaattttggctgtcagatccccattgccacaacccacatcaagaatacgttcaccttgggatggctggagcaatgataagataggtgtttcctgtaacgtcgcaaaaggagcggaatgaccactccacgattcgttcgtttgaccggatgaatgtccgttattcatagattataatctccttctgaattaaggatctaatgtatctataataactttaatataaaggaactgtcaattcactcatcagatcactataaaaaaagccgccgaatggcgactttaacattaagaattcggatcaactgagattttgttcgcccacatattccatatttcatactctccttgaatttgttctgtaaactgatgttgtctcgacctctacggtaactagctctaaccagcatgtgaagtatatctctcgatgtacagaattttcttcatacttgatctgtgattcgagcctgtcaatcaaaatttgcctcacatggtttgataaccacttcatcaccttactcaccaacttttcgaataaactttaatcgcttggctctgttaatatactcttagtatgccgagtcatgggctgcaagcggtatatcaatcgtcttaattgattgcctgatcctctcaggccctcttttggttctgtacggtaagctatataatgtaagtaggttaaatccgtgaggaggatacatatgaccgaagaaatatttcaaccaaaacaggaattgagtgacctgatcaaacgccattccaatcataacggtgcaatggaaacggcgatcccttccctgtttgtctatcaccattccaagattagtgaaccggcatacagagtatataaaccttcattttgtgtaattgttcaagggttgaaagaagtattgctcgcacaggagcgttatgaatatggaccttccaattacctgattgcttccatgaatctcccggtcatcgggcagattatcaaggcatccgccgatgcaccctacttaagtctcaaactcgaattcacaccgaaccaaattctcgaagtacttaacgaatgcaatatcaaggtaacattcaacgaaaacgccagacgagccatgtttgtaggtcagatggaatcgtccattcaggacgctgtactccgacttgttcgattgctggatacgccgggagagataccgtttctggctccgttgtacgttaaagaaatcctgttccgcctccttcaaggaccttacggaggagaactggcgcagattgcggttgaaggtagcagcacttatcggatcagagaagcgattgagaacatcgttcatcattgggaacagccatttcgcattgaagatctggctgagaccgccagcatgagcgtctcttcattccatcgtcacttcaaagagatcacagctatgagcccattacaattccagaaacaattaagattacaggaagcccggcgacttctgatggccgaatctgccgatgcggcagatgtagcgttccgggttggttacgagagcgcttctcaatttagccgcgaatatgcacgcatgttcggtgcgccgccaagagccgatatccgacggctgaaagagaaatatgacatggccttgagtgagtaaccgagtattcactctctatctcacaactatcacacaaaaggcaaaccaaaaaaggacaaccacaatgagttgtccttttttcagtatcagaattctgcgtaatatcttttggaattttcaaaatactcgtatttatgaaaggaaatcggagctgttctccttaatttttgaacaagattagaccaatgcttcgacccgttctggcatgtggatctcttcgtgcaataattgagtgatgtcacgagtcagtgcatccacattctcctgacgagttgcccagctggtgcagaatcgcaccgcactgtgtgtatcgtcaaccttttcccagaaggtgaacgtataaccgctgcgtaatttctcaagcaaacgatccggcagaatcggaaactgctggttggttggtgaatcgtacaggaagcgtacccgctgctgttcaagtgagtcatgaattctcaaggccatatctatggcatggcgagaaatatcgaggtacagaccgtcttcgaacaacgtttcgaattggatacctagcaatctgcctttggcaagcaggccacctttttgtttgatcatataacgaaaatctggtttcagtgcatcattcaggataacaaccgcctctcccatcaatgcgccaatcttggttcccccgatgtaaaatacatcacacaagcgtgcaaggtcagcaagtgtcatatcgcaatctcgggaggcaagtgcatatccaaggcgtgctccatccacgaaaaaaggaagaccacatgctctgctcactgtatgcaatgcttgcagttctgccttgctgtacatcgttccgttctcggttggctgagatatgtagaccattcctggttgaacacagtgttccggcgacgactcattcatgtgcgcatcgtagactgctctaacctgctcaggcgtgatctttccgtcctcgcttggaactgtgagtaccttatgtcccgtagcttcaatagctccggtttcatgaaccgcaatgtgtcccgaggacgcagcaatcacaccttgatatggacgcaaaatagaggcaatcaccgttgtatttgtctgtgtaccaccaaccaggaaatgaacatcagcttgctcattgtcacaagcctgacgaataagcattctcgcccgttcgcagtgtccatccgtgccatacccgctcgtctgttccatattggtttccatcagtctttgtaaaatgcgttcatgcgcaccttcgttataatcacattcaaatcgtatcatcgtgttgtctctcctgccttcttgttcaacttctcttgtatgttcatcatggaggtgtatacctcttgaatctcttcttcattcaattcttgcatcagcttcaggatctgttgatcggatcggtcattcaattgggcatacagttcctcacccttggctgtcagacgaatcagactgacccggctgtcggccgcagaatccactttcaccagcagtccttccttggacagcttgttcacaattcggctcatgtaactgcgatcaatggtcagtgtatctaccagattattcgcaatgctctctccccgaattccaatctcaataatgactcgtacttctgcaaacgaataccctgttccgagaatatgcttatcgagtacaccgagtatgttggtataaaagcggttaaaacgtcgcatgtcagccagtatatctggatttatgtactgagagtcgatgtcaaaccctcctttttagtggacattgtcaacattataataatcacgttagtggacgttgtcaacattatattttacatagcattttataacttcatttttaatatccaatcaataaaaaaagccacgcatatgcgcggcaaggttgttctgtcatcggagtgacgagtgtaattattttttgttcaatttacatggattaagagtgactatattgcacctgatgaagacggctgtatatccctccagcggcgaccaattcctcgtggttaccctgctcagcgataccatctgtgttcactacgataattcgatctgcattcttgatagttgtcagtctgtgcgcaatcacaagtgttgttctgcccaccgacaattcagcgagtgattgttggatcagtgcttccgtttccgtatccagcgcggaggttgcctcatccagaataagaatgggtggatttttcaagaacatacgagcaatagataaccgttgcttctgtcctcctgatagcttgactccacgctcgccaatgacagtatccataccatccggcaacgtaagaatcaattcctccaatgaggcacgacgggcggcatcccagatttgttcatccgttgcactcagatcaccataagcaatattctccttaatggtacccgagaacaaaaatacatcctgctgaacgattccgatatgtttgcgcaaggattgaagcttaacgtcgcgaatgtccacaccatctacagtgatacgtccctcttctacctcatagaatcggggcaacaggctacagattgtcgttttacctgcacccgaaggtccaacaaaagcaaccgtttcgcctggtcgaacagacagactgatatcacttagaattcgccgactggattcatatccgaacgagacgttctcgaagcgaatatcacccttcacactttcgaattcaacggcgtttttgctatccgcaatttctggttccgtatcaatgatctccagataacgcttgaaaccagcaatgccctttggataactttctatgacggcattgattttctcaatcgggcggaagaagatattagacagaagcaggaaggccataaagtcacccatattgattctgccatcgatataaaaccaagccccgctgatcatgacaaacaccgtaacaagtcgcatcatcatataactgaccgagatacttttcgccatcgttttgtaggcaagcagtttggttttacggaaattctgattgtccaccgcaaaaagttctttctcatgttcttcgttggcgaacgattgcacaacacgcataccgccgacgttgtcttcaatgcgtgcattgaaattgccgacgtctccgaaaagtcgccgatacgttttcgtcatccgcccgccaaatacgataatgacccaagccataattgggataatgataaaggtaagcagcgcaagctccagattaatgttagccatcagccagaacgatccgattaatgtcattactgcgatgaatacatcttcaggtccatggtgagcaacctcgccgatatcattcagatcattcgtaagatgaccaattaagtggcctgttttacgattatcaaagaaacggaaggacagcttctgcaagtgagcgaacatcttctcacgcatgttggtctcaatattaatgccaagcatatgtccccagtatgtaacgacatagttcaatacggtattaagtgcatagatggataacagcacaacgcaggcaagcaaaataagaggccaatcctgacctggcaacaactcattaatgaatttgctgacggcaagggggaaagccaactccaaaagacctgcgagtacagcgcatccaaaatcaatcaaaaacagttttttataggggcgataatacgaaaaaaaacgacgaatcatacttattcactctcactctccagatccttattgggacttacaccttcattttgcagctcgaaaagatggatatactcgtcgatgacctgatcaatagcttttaactccccactgatcatcgggcgaatatgttcgtactcctcctgtccaagttgtcggacaagcgttgttcttcgattctgcatttgttccagaaatacaagaatccggccgcgacggaatgtttgcgcaccacggccccgttttccctcatgttcaccatgacctcttccacgtctggaacgttcaccacgttgctcattgtcactcatatcgcgtctcggacgctcaccttgacgtacacttccatccatctcttcgataggacgatctctcatttgtgccacccccattacgtgtatacatatgtatacaacgtgttcatgtatacgattgtatacgcgacaaaaagaagtgtcaacctaaattttccaatagataacgaagtatgtatattcaccatctccctaacagaaaaaagccgcgatttcgcgacttcttttgttggcgacactattttatctcactcataaactttctatattcttgaaccatttctttggatcgggtgtgatgcaaataatgttctccctcaaatgtcatcacttttccatgtacagaatctttgacttgctcttcatgtaatggtatccatccttccgtttcggtatcattcgcttgtaagaagaaaatcacaggaagatctttggggaaggacaagttctcagctgctttgaaattaggaccaaagttttcaccttcattcaggttgttcggattaaacgtatttttgagtgaaagtattctaatttgttctctggtctcatcatcaacatcgggtgcaatcagttgatcaggggccagtttcattaacaatcggtagaatcctgattttttaagcagtttgtacgtttcggttggaaatggatcatcattacctccctgtgttgggacactgctctcaattccgacaaatgaacttacttcgtttggatatttgttcacataatccaggccgtatatccctgaaatggagtgagccatgagcgtgtaattatgaataccaagttgctgtaacgcttcatgaatttcactaaccatattttcagtggtacgctctttttcagtaatgtcacttaacccataaccgaaaggctcaatgacaacgactttgtaaaatggagatagctcatcgataagcggtttgaaatcaagggctggggcaggtgttccgtatccaggaagcaataccaccgtttctttgcctgttccttgaatcaacacattcatgtttttcccgtcaactgctacaaactgaccatagggatttattttcccttcttccgatttgttgctaaatacattaacaataaaaacagtggcaataaataatgcaaaagcgataacgatggctccgaatattttgagcaaaatgattaatatttttttcatcatgatggttctctcctgttgagttcgtttggtgttcagccgtttggaaatccattcattttatttttttaatgaaatttcgaatttggaaccaacctcacctgcaaatacaatacggccgttttctggtaaaacaacattattcttacggctgaccacgctgtgattaatacaaattccggtctggtcatagacagcaaaggctccattttcaggcaacttcactgtcatgacttttcctttcgcagtagctggtaccgaaaaccatttggcatatccatctgcttgaatggttgttgcggatcgtttacccgaatagattggtttcaccatttcctcactagcgtatacataacctgaaaatgtaagatactctcctccgttctttttggagaaatgaatgtccatcgtatcacgtccggcagtacccggaatctgcaattgattagctgcttcgttggctccaataatcttattattggacatataccccggattctctttattcaactgaataggcaggatcgatgtagcattaagatagagcattgatgtgtatttctcattcaccagataatattttttaccatcgcgctttgcccatgcggcgttaatctccttggataatttattggcttcaagcttctctccgttatattctgagaaagccagctgtccgagtcccggaacggatatataagatcgtgaccacaagtagattttcccatttttctccacaacgaatttcaacttgtctgtaccttcgttattaacaaaagtaccatccgctgtataggtgtattcttgagccggattactcggagctgtaagtgaagatacagtcatttttccagccgtatttattttgatcttcataaccgaattattgccgccatatatacctgcatatttggatattcctttaggcatatttgccttcacaggtacgccaaatgatttttccggcttccgttctttaataacgcccttttcctcaagtgcgctgagtaataattcattggcaataaaatgattggttaagcttgacccgcctgaagagataacggctgcagccatattgtattccggaagtaccactaatgaggactgataagataaagtatctccacctttcataacggccttaatgccgtattcgttgaatgggaacaagttcacactatcccaccccaacccgtaagacatcagcgtatcgctatcctctggccacatgcctcttttatactcttcttgcgccatagcttctacagacttactggaaagaataccatcaacttctcccgtgaagattcttgaaaatttgaccagatcttcagcggtggaatacagacctccagtaccgatgatattataattctcttttggaagtggtccctcataaaaaggggaatagattgctgccatgtctgacggattaaccacatcctgtggtgttttggtctgtttcatatccaaaggctccgtgaaatacttgtgtataaatgcggtataaccgatgccgctcactctttcgaccagaatttcggctaacgtaaagccatcgttgctgtagactgagtattcgccgggatctgctttcaggttttgattcgccaattgctccagaaacgtatcatgtgaatacgtgtcattatctccgtacaatgtggcattgctggttgaggtgcccagaagaccggaggaatgattcagcaacatacggggtgtgatctgtttgtatcggctatctttcattttaaagtcaggcatatagttcacaacaggcgcatccaaatcaatcttgccttcgtcaaccagcttcattacagcagctgtaagcatcattttactggttgaaccaatgccatagacggtgttcgaagtaagaggcaccttatcgtttatatcgtttttgcccgtttgaccggacaccacaatctctccaccatcgatcagtgcatattgcagactcgtcgtaccgtacgtctcggtcagtaatttggatttttcgatcacggctttctttgttgtctcatacgtaaggttactgttgttcatgggagccggtgcggccattgcagacattggggcaagtatcgtcagcatgagagtcacagcagctatagtatttctctttcttgctgtcctcacactcatcttcagttttgttacctctcttggtttcattcttgcatctactcctgtcttcatcattgtgttaagccaccttaaagtgggcgctaaagacaatataacaaaccaagatgtccccctaatggctgcagcatgaacggaggatgaacaggcaaaaaaagtttgcatcatcatacgcaaggaggtttatacagggcgtcataacctagtgaaggcatgaaatccaatcactctgtgggtgttgtgattggcaagatgactatgaaagtcgttcctcgtccatattcgctctccacccggatgtccccttgatgaagcgagacgatctgctttacaatagctagtcccataccgcttccttcatatttctgactgtgggaacgatcagctttaaagaagcggtcaaatatacgcttttggtcttccgggagaatcccaatacccgaatccgatatgcggatcgtcacgttcttgatattctgtttgatcctgatgctaattcgggcaccatcttcggaaaatttgatggcattgccgaagatattgatccacacctgatttaactggtcatgatcggccgtgattttggtgggctgcaaatcaagatcaaactgaatgttacgggccgaccattggggttgaatagcgacgattacttgtctgatctgttcatccagactgagcgtggcgagccgcatttgcaatgattgagattcaagcaaactcagctttagcagactatcacttattttggacattcgtgcagtttcagtgatgataatatcgagataatcgcttctttcgtcatccgggaggtctacctgcttgagcgctatagcaaaaccggaaatggaagtgagcggagactgaacttcatgggacacgtttgctacgaattccctgcgcatctgctcaagctgctttagatcgtgcatcatttcttcgaaactacgagccagagtacctatctcacccttttgtttaatattaagcttgacattgaaatctccggcagctataagccgggtcgcttctgtcagctttttgattggtctcaccagaaacatagccgcaattagtatcaataggcttcctgctaataacgaacaaatcataaaagttaaaacaaacttgaggagaaatgaggtggaagaggaagtgaggggctctacaaacattgctttgcttcccatttcagtttttatcggcaatcccaagaagatcgtatcgattccattgacttggaccctttccccatccagcactttcttcacttgttctgtcgtcactaggaaaggatgttgtcctttaagttctccataggattggaattgatccgttgctttatagattcgaatgtgataggaattgagttgtttcatttcacttataaacatttctgcttcatgtaacggcaatgtctcgtagatgcggacgatatcctggccaaagtcaagcaaggagccttgtaagttttcgtttaatttatcttgaaatatccaggttgtagcaagaaaagaaaggattatgcccccgatcacggagaccagaaaggtcaggactacgcgtgtatacaaggaaccgatcactcttgcacctcaagccggtagccaagcccacgcaccgtttcaatacgaaaatcggagatagccgcaaaacgttcgcgtagacgtttaatatgcacgtctatcgttcgatcatcgccagtataattaatcccccaaacttgctggattatttgctcccgcgtatagacttgtcccggtaatccagcaagcttatacaataattcgaactccttaagcggcaaggtgaacgactctgtacccctcatgaccttataagtctgccggttcaggatgacgttgcctaactggatggtctgcgttaaacctatacggtatcgtttcaacagtgccttgacgcgagccatcaactcaagcggatcgaatggcttcgtcatatagtcatctgtaccaagctgaaatgcttgtactttctcccaggtctcgtttcttgccgtcaacattagtaacggaagatccggattggctcttcgaagttcctcacataatgcccaaccgtccatgaccggcatcataatatcaagaatgaccaaatcgactggcgtggaggtatagatagccagggcttcctttccgtctgcggcgttgatggttgtaaatccgtcgttgcgcaaaaataaacagacaagtttgcgaatgttcgcatcgtcgtcagcaactaatatcgtaggcatcgtttccactcccctaaaaaagaataattcttcagttaagcaagagtgaagaattctaactgaagtgacaaactaattatagttaaattgaacaaaagcagccgattacattgttcggctgccttcttagtttcgttaaattaacgtatcccgttagggagctcaatcatatcaactctgagataaacagtggtgtagctccatcctccgtattaaagccaaatttattatagaaatccactgcatgaggataagaaattaatacttttgttttacactctttatatcgatcaagcattatattcatcatttccttacctatacctatactctgataactcggattaataagcatataatgaaaatataccgttaaaacaccatctgacaaagcatttattaaaccgacaagctttcctccttcccaagcggtaacaattgaatgagaccctgcgattgcttgtaaaagctcgtttgggtacttaccagactcccattctaccgaaagaaataactcttggagtgcatccttagtgatatcctctttgcttgaagcgtaataaatactcaccctataccttcctctcataaaacgaacagcaataaaataataccgacaaagccacttcggatttctcaaagtgaataatcactacatttacctcaatatactattagaaatatatatacaaaatggattaaacgaagtcgaatttgtatttatttacatgtgagaattcatgaaaatacttcttttacataagcatactaatcctgagagactttagcgttaatctgccccttagtttaactgaaagacagtcgactatttagccggctgtctacttagaggggataataccattctgcaacttttttctgttcatgttcttgctaccttactagaactcgtctatttcaatgaaatttcgaacttggaaccaacctcacctgcaaatacaatgcggccgttctctggtaaaacaacctcattctcatcgctgactacggtgtgattaatacaaatacccttctgatcatatacggcaaagccgccagttgcaggcattttaaccgtcatgacttttcctttcaccgttgctggtatcgaaaaccatctggcatatccatctgcttgaatcgttgctagagattgtttacccgaatagagtggttgtaccatttcctcactggcgtatatgctaccaaccgctgtaatgtactctactccgttctttttagcaaaataaatctcctttgtatcacgtccagccatgccagggatttgcagctccgtgactgcttcgtttgctccaataatcttagtgttggatatataccccggggtctctttgtccaaatgaatcgggagaattggtgctgaattgagataaaccgttgatgtgtatttctcattcaccaggtaatattttttaccttcacgctgcccccatgaggccgtaatatcctgggataattcattgacttccagcttctccgctttatattctgagaaagccaactgaccaagtcctggcaaggatacataagatcgagaccacagataagtccttccattcttctccttaacaaatttcaacttttccgtgccttcatcgttaacaaaagtaccatccgctgtataggtgtatgtttgagccggattacttggagctgtgagtgtggatacagtcagttgtccagcagtattcatttcgatcctcttaaccgaattattgccgccatatatacctgcattcgtggttatttctttaggtatatctgccttcactggcacaccaaacgatttttccggcttccgttctgtaatgatccccttttcctcaagtgcgctgagcaataattcactcgcaatgaactgatctttggcacttgtcccacctgatgaggtaacggctgcagcaagattatattccggcagtacgactaatgatgagtgatacgatatggtatctccaccttttgttactgccttgataccgtattcactgaatgggtacagatttacactatcccaccctaaaccgtaagatatagacgtatcgccatcctctggccacatgccttttttgtactcttcttgcgccatggcttctacagacttatcggtaagaatgccttggacctctcccgtgaagatttgtgaaaacttcgcaagatcttcagcggtggaataaatgcctccagtagcgataacattataattctcttgtggaagctgaccctcatacataggagaatagattcccgccattgctgccgggtcaaccacatcctgtggtgttttggtatgtttcatgtccaaaggttccgtaaaatattgatgtataaaagttgtaaaactcatgccgctaacacgttcaaccataatctcggataacgtaaacccatcgttactatacacggagaatgcgccgggatctgccttcaggttttgactcgccaattgctcgagaaacgtatcatgtgagtacgtatcattatccccgtacaatgtggcattgctgcccgtgctgcccagcagcccggaagaatgattcaacagcatgcgtggtgtgatttgtttgtagcgatgatctttcatctgaaaatcaggtatatagttcacaacaggcagatccaaatcaatcttgccttcgtcaactaacttcataacagaagctgtgaggaacattttactcgttgatcctatgccatagatcgtatccggcgtaagaggcaccttgttgtttttatcgtttttacccgtctgaccggacaccacaatctcgccaccatcgataagggcatattgcagacttgtgattccatgtttctcggtgagtaatttggctttatccgctactattttctctgttggttcatacttcagatcgctgttgttactcgtagctggtgcggccatgactgacattggagctaacatcgttaacaccagcattaaggcggtgattgaagtgcgttttcccttttgtcgtcccattcacatcatctcctgagtttacatgtttgttttggttgattagagctcttctgggtctacaaatttcacctccggatacaagtcgttcggtccctgaatcaaatctccaccggtacctttcagttgcttgttaaagaaatcgagtacatattcgtttacgatgcttgatcctcttttaccattgatgtctcctgtgatcccggacagtttaaccagctccgaatagaattgaaggtccgtgaaattaaagtgctgggttccttctacataaatcacatttcccccatgattgataacatttttcatgatgtgcagctcatctgaaagagatttagttacttcatcatccgaatttctatccacttcaaaattggctaaccagtcttcaaaacttcccgatcggatgaacataaacggcttgtttatatcatctctattttccacttcatatagtgacccatccatattaaccccggccttgattctctgatctaaatacgttgcattaaacgcggttgcacccccaaaagaatgccccatcgcgcctatgttatttaaatcgatcttccctttaaactgactttcgattgcacctgaattcagcttttcgatttgatcgattacaaactccacgtctttcgtccatatattccctgtttttgtacgttcatctagtgtagtcgtactttttttataatccgttacacggccatctggaaaaagcgtagcaaaggtgctatacgtatgatcgatggtgaccacgataaacccatgactggccagattctccgcctgtgatgcttgtagaactctactagttcccataccatgagatagcagtaccacgggataaggacttgtggaaggtaatatttctacattttcataagagttggtgtgactatacttcaagtagtcgagtacaaattcgggcatttttaaagaaccagagaagctctgaatatactttttgaacatttctttattatttggaaacagcgtgtcacgcttgatattattcctattttcagtagggtaccaaacttgaaccattagttccctcttatcactttgatcttcagtgaagacttcatctctgttctgatctgtaaaatgaaaggtttgagtacccactttctctggaccatccggcttcggcaaattaaagacaggtaagtatacagacaaggcagtagaagcaaccagcagaatgacaatcagggaagataaactatatttcaagaacttccctatttttagattcatcatcttttcggaatgtctgagtaaaacaataattatgaatagagccgtcatgatatataccaaaagcaactgccatctgtatccctcaactaacaattgaactacgagtataacgctacttcctatccccaaacccaatcctgttttctttgcacttcttttaataaatagtaggtctacgagtaaagcaaaacaggatagaactaacagtatctcaaataatctcatgttgaattcctctctctttcatcacggcaacggccgaaaccatatttattttgcttcgttcataaatgctcttacatcttcagcaatttttttgaattgagtatgatgtaaataatgtgaaccatccatagtgatgactttcccatgtactgaatctttgatctgcccttcatgcaacggaatccatccttcaacaccttcattatttgcttgtacaaagagaagaagtggaaggtctttagggaaggttaaacctcgagcacctttgaaattggaataaatatgatccatctcatttaatgacgtgggattatacatgtttttatttgagatcattttcatctgctcaactgtgtgatcgtcaaatgccagtccctcataggggtctgcatttactttcatcattaatcttaagagacctgtatttctgagaagcgcaaacgtttttaatgggaacttcgcatctgtaatactaggttgggtggaaacactactgtcgataccgacaaaagcagtcacctcacccggatatttgttcacataatcaatgccgtaaatgcctgcaatagagtgacccataagcatgtactgatgaatatcaagttgttgcagagcttcatgaatttcacttacgatattctctgtggttctttctttttcagtttcatcacttaatccataaccgaatggctcaacagcaaccactttgtaatatggagataattcatcaataagcaacttgaaatcaagcgcaggtgttgctgttccaaaaccaggcagaagtacaatcgtttccttgccttcaccttgaatgagtacattcatatttttcccgtctacagatacatgctgaccataggaatctattttcttggcctctgaattactactgatcacattggtgatataaacaatacctagaaatagaataatggcgattacgattgctcctactattttcagtatcatgtttctcacttttttggcctttgatctattctttgttttcttttccgctggctgcgtcgtcagtgttatcttctcctgtcttgaactgatagttcgattgtcttttttgctgctaatgaaatcttatccaatgaaaatgtactcctcgtgacgtcaatatgaactgaatatgaacaagccaattcatttatatttactgctgcgtcataaatcccctgaatttttcagcaatttctttggcatgggaacgatacaaataatgatttgcttccagcaacaccacttcaccacgcacagagttctctattaacttctcgtgttccggaacccaattgtctgctgccggatgattcttttgaacaaagaaaagaaccggaagattaacagggaaagttagttgttcagatgctttaaagttggaatacatactttctgcctcatttaattgcgtggtattatacatatttttgcgtatcagaatgttcaattgttctttcgtttgctcatcataaggcagtccatcataagggtcagcactcagtttcagttgcactcgggcgaaacccaagttgcggaaccatttaatcggttgtgtatctgatgaatcaatcttctgttcacttatcgctggaacactgctatccagcccaacatatgcacttatttcatctgcatacttgttcacgtaatccaggctatagatccccgaaatggaatgacccatgaggatataacgatcaatatgtagacgctgtaacgcttcatgaatttcactgacgatatttgctgtgctgcgttcctttttggtctgataactcaatccgtaaccaaagggctcaacaacgacaactttataatatggagataactcggagataagaggtttaaaatcaagcgctggtgccgctgttccaaaaccaggcagaagcacaatcgtttcctcgccttcgccttgaatgaacacattcatattttttccgtctacggatacatgttgaccatacggttccattcttttttgctccgaataactgctgattttattgacggtatatacgatagctacaaaaagtaagattgctataatgattgcgcaaagtactttaaacaaaatgcttaacactttcttggttttgcttttactctggactcctctgtctgcttgtagattcacattcatctgctcctatcctcatctgtatattggcctggcaggccgcttaagaaatcctaatcaagaaagatgtactccccatgaccggaatatgaacggagtatgaacaagcaaaaaaaatgtcctatgtaacatacaaggaagcttgcatgttacataggacatgaacattcggtttagataatccgatggatattctattcattggcctaacctgtgagcctaactatccgttggtggatggatgggcaacgtaatcataaaggtcgtgccttgaccaggttcgctttccacttggatgtcaccctgatgaagggagacgatctgtttaacgatagcaagtcccataccactcccgtcatatttgcggctgtgggaacgatctgccttgaaaaaacggtcgaatatacgcttctgatcttccaggggaattccaatgcccgtgtcggatattcgaacagtcacatttttgaagtcctcttcgatactgactttaatcataccgccatcctcggaaaacttgatgctatttccgatgatgtttgtccatacctgatttaactgatcgtgatcagccgttaccttcacgttctccaaatcaagctcgaaatgaatgttgcgcccagaccattgcggctgaagcgccacgatgacccgcctgatctgttcatcaaggcttaaggtggtgagccgtagttgctgtgactgcgattcaagcaaactcagcttcagcaggctatcgctcattttggacattctttttgcttctgagatgataatatccaggtaacggtttcgttcttgttctgagagatttacttgcttcagtgccgaagcgtaaccggatatcgaggtgagcggagactgaacctcatgcgaaacattggtaacgaattccctgcgcatctgctccaactgctgaagatcatgcatcatttcttcaaagctgcgggccaatgtaccaatctccgtcgtttgtttaatgttcaacttgacgttgaagtctccagctgcaatccgtttggtcgctttggtcaattttttgatcggtctaaccagatatacagaagcaaccacaatcaacaaacttcctacaatcaaggaacagcttgcaaaaatcaagccaaactggaccacaaaagaggctgagggcggtgagagtgtttctagaaacatcgctcttgtacccgtttccgtcttgatcggtagccccaaaagaacggtagcgatacctttaggtgtgtcctgcacaacccctccgtttaacaccttcttgagttgatccgtcgatacgggtgatgatttatgttcgttaagcttcccataagactggaacttgcccgttgcatcataaattcgaatatgatacgaatcaagttgtttcattctactaacgaatgattctgcttcatcagcaggcagcgtcttataaatctgcacaacgtcctggccaaaattgcgtatgttaatttgagcattttcattcaattgatcttcgaacatccaggttgacataaaaaatgaaataatcgtgcctgtgatgactgacaccagaaaggtcagaacaacacgaatatataaggatctgatcattcatagacctcaagtctgtatcctagcccacgcaccgtttcaatccgaaaatcaggtgtagtcgcgaatcgttcgcgcaggcgcttaatatgcacgtctattgttcgatcatctccggcgtagtcaattccccatatctgatcgattaattgctcacgtgtatagacttgtcctggtgttccagcaagcttatacagcaattcgaactccttaagtggtaacgtaagcgactctgtacctctcatcaccttatacgtctgacggtccagaatgacgttgccaaactggattgtgtgtgtggagccgattttgtatcgtttcagtaatgctcggacacgagcggtcagctctaatggatcaaacggtttggtcaaataatcatccgtacccagttcgaatcctttcaccttctcccaagtctctcctctcgccgtcagcatgagtaacgggaggtcgggattggctcttcggagttctttgcacagtgcccaaccatccatgacaggcatcataatatcaaggacgaccagatccactggagtttcgccatatatagtgagagcttccttaccgtccgcagcttccactgttgtgaatccatcgtttttgagaaatagacagacgagttcacggatgttcgcatcgtcgtctgcaacgagtatagtagccatatgttttttctgtcctctccgttacgtttaaatgtatagttcaacttgtatagtaaatattaaaacatcttgcttatagtatatccacagcaaacatcgtatgttctttcaacgttccctggattggcacaggctgtgacccattctccttgaatcctgctttttgaaggacacggatggaacctgtattatcaggtacagcgccagcttcgattcgagtaatttcagtttcgtgtttggcaaattccagtacacatcgcagggcttcgctcatatatccttttccttgatgcagagtatccgtcacataaccaacgatccattttggggtagaatgcagtatgatctcgaacaaagaaatttcaccgacgagttcatccgttgtatgtagaaaaataccaaaagaatagcgatttccgtctactctcttcttgttccagctctcaatgagtgacctttgcccttccaagctgtagaaagactcctcccgatcacttgctgatatgttctcgatttccgcacggttgcgaacctgtagatccaaaagcaatgcggcatcatccacattccaaaatctcacatagatacgttctgcactatatttcattactttattcctcctctattaacgttaggtgcaattgtagcatgattatatcaggtcattataagagtacgagcgaatcaacgagaattgcttcgccaggaaatgaggtgaatatggcatatcattacgcaaccaggcaacaatggttccaatcagagccgaagaaccgtaccatattgcgatttctttgtgaattccggattcttcgagttcatcttccatctctacccgatcaattttggctttgaccagcgtacttaacaatttgagcagccgttcggtaaaaatcggtgtgcgctttgtagcaagaaccacctgatagaacgaggcattctctgcaaaatgttccagtaacttgaccagaacaggccaagcctcttccgttctttgcttctcaaaatgaggggcatattcatccacgatccgttcaatattctcaatcatctcgtccgccatcttctccatcatatccgtaatatcacgatagtgcaggtagaaggttacccgattgatcgtcgctcgttcggcaattttgttgactgacaacttctcaatatccatttcctgcagcaattcaacaaatgcacctcgaattaactgacgtgttcgcaatattcttgggtccacggctgatttcttctcgtctttcacgtgtatccctcctatcaaattttaaacattacaattttaaacaatcagtcgtttatttttgatttacacaacaaattcattttatttgtaaaataaacgacgaaaacacgtcataacgtaaattgtaatctgtccgaatatgtatataattcaataaatacaatgtaaactatacaacacgttgtaaatttagtcacgtgtggattgaaaggatgaaaaggattgagtcaggctagagtacaagaagaattatccgtaaagaaaggccccatcctgtttatcatgattttgggagccttccttgcaacgttgaatcaaacgatcatgagtgttgctacaccggaactgatgggtgattttaacatctccgccgcaactgcacaatggttaacgacaggttacatgctggtgaacggggtgcttatccccattacggcctacttcatgcaacgcttttcaaccaagcaattattccaagcttccatgtttattttcctgattggtactatcgtatctgctcttgcagataactttggcacactgctgacaggacgaatgattcaggcagcgggtgccggcattatcatgccgctcttaatgcacgttattttgaccttgtttgctcctgaaaaacgaggatctgcaatgggtatggttggttttgccatcatttttgcccctgcaatcgggcctacccttgccggttatattctcgagaactactcttggcaaacgatgttctacggcatgattccattaactcttattgtcattgcttttgcgtttgtatacctgaagaatgtatccgaacgggtcaacacaaagttcgacacaatcagtgtggtgctctccacgatcggatttggcgcattgctctatggtttcagcagagcaggaagtctgggatggtcaagtgcagaagttcttatctgcattgcggctggaatcgtttcgcttgccctgtttacatggcgtcagctcgtgtctgaaactccgctgcttgatctgcgggctttcaagtacaatatgttctccctgaccacggtcatcagtatcgcgattacaatgatcatgtatgctgacatgatgttgcttcccttgtatctccagaacgcacgtggttacactgcactggagtccggattattgcttctgccaggtgcacttgtcatgggcttcctaatgccagtagctggaaaattgtttgaccgttttggagcgaaatggctcgctgttatcgggatggtgatcaccatcgtgaccacaattggtttcatcgacttaacggattcaaccagttatggttacctggtattaatgtctaccggccgccgaattggtatggctctgctcatgatgccgattcagactgcgggacttaaccaactgccaccaagacttggtgcacacggtacagctatctccaacaccgtcagacaagtggctggcgctgtaggtacttcattactcgtaagtgtcatgacctcccgtacaacggcacacgtacaggatatgatggcgactggtgcagccaatggtctcagtcaaaaacagcttgctacagagtccatgatccagggtatcaatgatgcttatgttgttatcatcggtatcgctgttgtgggattggtcctttccttctttatcaaacgcaccaaacaagccaaagaggaagaaatcaaacaggtggtaagacaaaaagtttctatgaattcaaattaaggtgtccagcctcatagttgcttgcataacaaagcggcagatcaagacgtttacgtctgatctgccgctttttaggttgtgtcccgtatgattccttctcactccgcaacgatcttcactggcagatgggtcaatgactgtcccggagctgaagtggccagattattctccagatcaaaggactccaccggttcaatctgagcaatcttctccacaaatgctgtcaaggcaatgctgagttccattcttgccagcggggcccctagacaaaagtgtgggccattaccaaaggtaagatgtcttttgttattacgacgatgaatattcagctcaaacgggtcttcaaacatctgctcgtccatattggctgcactcatccaggagatgacaacgtctccttttttcaaatccactccgagcagttgattatcctgctttactgtccgatgccgcttggcattatggaaccgataacgaagcatttcttccactacgagcggaacccatttggggttctgcctgagttggccatacaagctcgggtcatcgtacaggaaggaatagaacgtatttgagaccatatgacttgttgtctcaataccggctccgagcaggagcatagtcgtgcgaacaacctcatcctccgtgaacttctccccctcaacatccacgttcaacagatccgtaatgatatcctcaccaggatgagtccgtttatgaaccacaataggatacaggaattgataatactcttgcgcggcagtttgttttttcagttcactctcctcagccgtcttgggattgatgggttgaaacagaatatctacccagttcttgaatcgatggctgtctgtaagggggatgccgagcagatcggccataaccatcgaaggcagtggagcggccaacgcttgaacaatatcaatggtcgtatttggctcaatatcggctaccagctgttctgcaatgttgcgaattcgtggttcccagtttttcagactacgcggagtaaaagcagcagataacaacgaacgactcttttgatgacggggaggatcgatacttgatatgtttaatttgtctggaggtgtgccttcattgttctttgctccaacggcaatcgttgtccgggttccttcggctgaaaaatactcatgattactgaggacctgcttcacatcatcgtatctgaacacattccaggtgtctgtatcttcgtgatagtacactggatgctcggacagcatttttcgaaaccagtgaagtgggaaaaactcttcagatctcgactgaaaccccgtgatgtcctcaacacgtatcacttctttatacatttggaatccacctctcagcatagtttcgtgattggttacatgggtacctgaattgacagttcagcacctgattccattttataccatacgttcatttattgatataaaccatttgaactaaatcagaaaaaccccttaatataaggggttttcgttttatacgtatcgtatattatttctgttgatgtctcaaagagataagccatagagccgatcaatcgcctagtttcgctaatgcttcctgtagttgctccagttgttcagacagggtttcaatcaagttcttcgtttggcttgccttctccattaagatttgctcttcagaactgtcttcggatacattcctgattggtgatgacttcaattccgacaattcgcttttgtatgtttcttgtttctccaaagctatgcgcagtttttctttcgtcgtaccgatctgatgctccagatatatgatgtcggacgagttcgctccatcggatacacgttgtgaatatgtcatgactcacctctttcaatttcatccattgctttgccaacagtgtagggctcaatatcgatatccagttccatgccgagagctagtttcgccagttgactcccgataaaaggacccatagtcagtccagaggctccaagtccattcgcggcaatcaaaccttgccagcctggaacagcccccattactggcagaaagccaggtgtgaacggacggaagcccactcttacttcctggaatgtgctattagctagccccggcgccagttccagacctttattcaaaacttcctgcatgccccctgcagtgactcttgtatcataaccctccacatcattttcatgagtggcaccaatcacaatcttctgttgatcaaaggccagcagatattgatcagaaggtggcatgatcacaggccagcggcctgtatcctccccatccgtgacatgtagatgcataatttgtgccttttgataacgcactttaaagtgtatgccgagtggcttcagcagttcgttggcccatgcacctgcacagacaacgacttcatctgccaggaaactctgatcattaacactcacaccaatgacccgatctgcttcgaattgaagcgtggcgtctccatggatcacttccgctccatttcgctgtgcagagcggatcaatgcatcgcgcagcgctcttccatctatacgtgcagcaccactgatatgtaccgattgataacgttcatccagcaatggaaaacgttcacgggtttctttgtcatcaagaggtgtaatgtcgccaatctccggcgcatctgctttgcgaagatgggcccgctcttccatcttattgattttgtccacatccgtatgaatactaagcgcgcccacttgagcataaccggtttccgtttctccttcgccttcaagctccgctatgatgccaggatagaaccgcgcacctgccttggcgagctgataccagtcctgattgcgacgctgtgacagccatggacagatgataccggcagctgcatccgttgcctgtcctatatcttttcgatctacgatgatgacctctgcgccatgtttggctaattgataggctgttgatgcccccagaatacccgatccgactacgatgactttcttcatgtttgcatccctttccttaatcactcattcgttatagcgtataccgtttcgcattctgttggcaaggcgggcgtacttttagatccataaatagaggctgatcagactacagttcatactcattcatccaataaagaattgttgaagcatttgtatgaaaacgttttatatattgcctgtcattcaattaaaattattccatttatgtaatataattctttctaggtttcttttaacgctgtaaccacgccacttacgcacatgatcctttaacgaaaagaggaataacacgacgatgccgaaacctagtatggggaatccgatggataccgatatgccgctcatgattacagggcaaaaccagttgaccgttgatgaattgatgaattggagcgaccattcacgggattacagcattgtacagtgcatcggaggaacagggcgaatcgcagcaaagaatcatgaattttcgatcaaaaaagggaccgctctcattttgttcccggaggtaacctaccgttaccacaatctgagtgattcattacgatttgattgtctgtctttcaatggctatttgttgccacggttcttgcataccttgcagatcggggagctgcgcgccttcaagccggatggaatgcttcatatcctgttgcgtgaaattacgttggcgctgcagtcccggcacaaggatcagatctggcacgtctccgcattactgtacatgcttttggtcagattaaccattgaatgtgaacgctatagtgcttacgaacgttctgatgcccgattaagattggatgaactcattacttttatcaaacaaaattatcatgaggatatttctctccccttgttggctgagcagatggacgttaccgagcagcacctcaatcggatattcaaaaaagaatttcaaatgactccattggagtatctgatgcgatatcggttgttgaaagccaaggaaatgctcatcgaaaataacgctacgaccgctcatgaaatagccaaagccgttggtttcaacagtgccagttactttgggtcagtgttcaaaaaatacgaagggatctcccctatcgagctacgcaagcagtatctggattaaagcgcctccatatcgatctcggccagcgaggataaccgcagttcatgcatggcgaattccagaccacgcgttacctcgttaggtacgatgatacaccgaatacctgctgcattggctgccttcaagccattaggtgagtcttcgaacacaatcgcttcggaagcctcgatcccaagactctggagagcaagaaggtacagttcagggtccggtttcactcgcttcacatcctcgcatgtatgaacgactgtgaaataatcgaaaatgcctaatttctgcaagtaaccatgcacccagtcccgtgtagagctggaagcaaccgcaagctgaatccccttctccctcgcagactgaagcaattcatacacccctggaagaatggcagcctgtcccaaatagacttcgtatttctgttcagagagcagtttgatatgatcatgatctatctttttttggagcgcttgctccagatacagaaatggatgaaactcctcaaaggatgtccccacatttttcgaccaaagctccagaccaagttccactccgtgctcttcataaatatcgcgaaacgcataataccaaggtgtctctgtatcgacaatgagtccatcaaaatcaaatataaatgcttttaccatgaacctgttctccctccagtgatcggccaggggagcggattagaaacgtgcggtcaagtccggatgagtaacgttcaccgataaaaagtgacacgtacagcccgttccagtcggcgactgaacaactaatccagctcgaagttccccttgtatcggcatgccgaaataacgaattagtttccactcatccccatcgggtgaataaaagaatgatatgcagccctctactttgcgtatacgcagatagggattaggtatggagacttccaccgaattacaatcatcggatgaaccatcacgtgtcaccaccgacacgatggtaggcacttttccatcatactcaaaacaaattttgcaccagttaagatcatccgccatcaccatcagacatccggaatcatattgatttttcatatcaacggttaattgggttgtgatttcgaaatcgccaggcacaggcatggacagaaatggtgcggttgcacgaatgtgcttgcccgctggatcttggaaaaagtcggtgtccgccttcgcttccaccagcacacctccctgatcggtataggaccagctttcgggttcgttcatccagctccattgcttccgcgcttctgttgtcattacgttagtcatttttagcagcctcccaagttaaaatatgttctagaggttgttctagttttttctgtactacatattcgctccagatacagtaaacccctttttctacatatttttgtaaggttccagcacttgggagtgcttttgcggatctggcaggaaaaacatgatgaccatgagtacgacatatagaccaagaatgacactgaacaacagtgttggattgtgatgatagagcaggcccgtcaggtaaccggatggaatggctgtaagcgtcatgacggtctgcacggccgagaacatatcggctttctcatgcgtacccaatcggttcatcagcagggaatcccggtacgtctgcaaaatgaagttccccgcagcgagcacgattagcgtgagaaacaacatccctatattcccaacagggatcaacagaaacagaatggctccggccgtgctaagcacgatggaaaaaccaacatacttttcttccgaacgccgtttcaatcgcggaatgatgaccagatagagcagcatgacggttaccgcagtcactactgggataaacgaaataacacggtcatcaaatttcaactgttccttgaagaaaatgacctggaagaaattcagctgtaaaatcagattggataacaccgtgatcagaataatcggaaaaagtcttcgtttgtagaacgattttccaaacaggcgcagactggaacccaagctctgaagcacgcgggttttactatgcaatcccataagttccttgccgacctcggtctcatccgtgtatcggttacgaatgaaaaacatggcggtcatgaggatgcctccgacaaagtaaatgctggcgagtgtaggcacaataccataatcagcaatgaccaccccggcaattggcgtgagtaccccagcccctgtaataatcatgttgagaatggcaaataccttggatcgtttgtgttcctccacatcctctatgatcagacagttaaaggcgaccgttacaaacttggatgttgcattcagtaaataagcgatcaggaacagccagaagttctgggagaaggcccagatgaacatgggaacactccaggcaagcagatcaaagatcagtgttgttcgttttcgtcccagcttattcgtaatggaacccgcaaacaattgaaagataaaggcaaaataaagattcaccgaattgattaaaccgatttctatgtccgaaagtccggcttccttcatatataaaggagcgtaaaagagaacgatcgtgcctggaatggcccataccggttcgagtaaaatggagtagcgtggattcttcggcaaatcttgaagcaatttcaatcgatatcccttccttctacggttttcaccgctgcgaattccaacttctcgcagcggcaaacccgctaatgtctacatgcttatcgtacctcttataggataagagctgttttgaccgagttcatcggcaacttctctccagtgtgcatgtcataaccaatcgttccattaaaggcctgttcataatcactcagcagttccttggctgtcaccatctgttccagttccgggatgctttgggcaaatttcagtgccgtactgatcatcgagtgattagccactgcgccgatgatactaatgccatcattaatcacggctgttgatttgaacgtcacctcatagctgtcgtcatatcccataggaataatttttccgcctttggcaatcagctcaaaccctacatgcagctggttaccaaccgcgtccactacaatatcaaactttttgttattattgatctcgtatactttatccagagtcagatcctgaggatagaacacatgatccgcgatctctgaagcaaactctttacggtatggatcaacttccgtgcctacagttagccttgccaatcgtttgctaacaagctgacacagggaaccgattgcaccagaaccgaggaccagtacggagtcacttggcttagtcccagctttcatgaacgtctgaagtacacatcccagtggttcgatcatcatggccgtttcccaactcatggaatccgggatggcatagatatacttttcgtccccaacaaaatattcagcaaaggttccgtgtgtcgtcatgcctacttgatagtcatcaaaattctcgcagtagatgaacagaccctcacgacagtatgagcaggtaccgcaagattgcgtgggatcaaccaatacccgatcaccgatcttgaaaccacgaacgtcgtcgcccacctcaaccactgtgcctacgccttcatgaccaatgatcgttcctttattcgccggcactttgcctttgacaatattcagatctgtcccgcagatgccggaaccatagattttaatttttacctggtttggcttttgaatggttggctcctcaatctcctggtatgtcacctgtttgagatcctgatatacgagtgctttcattgaataattcctcctagtcgattgtcgattatgatctatggattaagcttcaaacgttttcgaaagttgcatcgcatgaagatgttcctgcttctgaatctctttccagtctgacaggatctgcagcagcgcttcctcgacccacagcaattcttcccgtgtatgggcatcagagaaaataaagtaacccttggtgaaaatgccgaagtgagccattctcttcaccatgaactcgcggaaagggtctgtctggaagttatcttcatccagggattgaatgcagaagcttgcatacgtccctctcacttccaattgatccgtcaatccgagtaatacaagttcagattccagacgatccatgatccgggttgccggatcacgccaagtcggccatactttcgcatttttcattaatcgttcacaggcaatggctgctgcgagcgctgtcgtttcactggaatgggcattactgaatctgacctgtcctgacaaagacatcaagtgctcaggccccataaccgctgcgagcggtaaaccgttggccatacctttagagatacagagcagatcaggccagatgtcatattctcctgctgtagcctgcttgcccattcgaataccggaagttacctcatcgaatatgataatgatgtccagagaccgacataggtttacggcttgctccagcgcgtcctttttccactcgttggggcatagaacaatacatgcgatatcctcgggagacgcggtaatctgagcctcaattcgctccgtagtaggcttgttaacccagatcgttgaacgctcgatatccaccgggatgccacgttctttcgtctgtccaccataatagccataggcagaccagtcgtgccacccatgataagctgttgcaataaccttgcttttgccactagcggcacgggccagacgcacggccccactcactgcatcagcaccactcttggtgaagcgcagcgatggataacgaccctcgaaccgctccagaatcaactccgcgcattcaagctcgatgtcggcaggtaaagaaaagcttgtcccttttttcaactggtgaatgacggttaattggacttcatgtctggcatggccccatggcgccgtacccatggccatttcgcaatccagccattcatttccgtcgatatctgtaaatcgggaattataagcctctgcacaacatacgggggtatggcccggaaataaacgttcaggtgctttggctaaagtgctgcatccgctcggaattaccttttcgacttgttccaaccactccagattacgggtaaaccgtacggcacgatcgagcgtgctctctttttctttcaccttaagtacctccctgtttattttcgttgtgagtgaattaccgaactttggttccaggccagcatccatcgtatatgcgatccatcgtgatcacattgccatacagatcaatgatcagatccttggctcgatgagcatgtctcatctcaatccagtagcggttctccagcaaacgggcgaaattgtccaccaaaaacagtaaccggttctcactatgaatcagttccttacccagtacctgcggcagccagatggctccgttggaattgaagcggttggaatagtcacgtacttcggcaaccggtgcaaagtcagcttcctccagcttggtccagaatgtatctgcatcactgcgaacctcggcaaggtcaatcccaacaatcggcagatgctggtattcctcttggctttcaagctgtgcttttagatgactgaaaacgaaaggccacacatcagcttcgatttgaccgccccactttttccagaagcgtgccagattgttcttacggttgaagttgcggtgaatgccgctgctgcgttcccagtgataggcttgaatattcgggttgatgaccgtatcgtatccggcagctcgtgcccgcatctgataatcaaagtcctcgtatccgttaaagaacttctcatcgaggttgccgatggtctcatacacctcccgcttcatgccaaacatggcaaagaccaccagttgaacagagaaggtttcttttgggatatcatcaggagatgcgttcaggaacaggtgtcggccgatggtgtccgcaaaagcaatgccgcaatgctgcacgcctcctgtttgtggatacaacagaacccctccaatcatgccaatcgtaatatcgctatccagtgtctctttcatcatcggttgccagttcggttgaagaatggtgtcagaatccaggaagaaaatgtactctcccttggcaagactcagtgcgctattaatcgacacggcgcaaccgagtggaaaatcatgctgaagaatctcgatggtcacaccttctcttacttcttgcttcagtttatccagatgttgaaagactgctgagccggaaccatcgttgatgaaaataatctgagtggatgggctaaccgtccggagtagcgaatctgtgaacaggttcaaaatgttatagtcctggttgactggcacaataatggtgtaaagcatggaatccctcctgatttgggttgatggaatgagtacataagctgattttgaactgcacaattgaaggtatttctgcccggccccctcgtttgaatattttgtctttatttggtaatgatttgaatctactagaaatttatatcattttttgtaaactgaaaatcttaaattctgaactctgttaatatttgaatatgtgagaaaatcaagtttttgcagcttgcgcactgagaaacgctgttgtgaacgcaaaaaaacaccctcaaagagtctgtgtatctaacgatacattcgactttttttggggtgttcgcttgatggaaatctattgattctcgctgaattaacctttagctatcgctgcttaaatccatgataaaacgtatctaccacaagcgcaggggctgcttttctcgcgatatgaccacttacaacctgctgccacgtcaggaacatgatggaatacaacacatcgacaatccaggttttatcgagatcggagcggaaataacctttctgttgtaacagaccgaccgcgtgtaatacaggttctctcagtttcagatctgctccctcaatctcgggattatagttaatggtggtgtcatgagccagaaaataaattttgtcgcctaatggaatcagcgcctcgatcagctcaggtatgtacttttcacagtgctcctcatccagttggatttctttcatggtctcactgaccacctcgattgcgcgtaatccgagatataccatgagctgttcacggctttccacatatcgatgtaacgtagcgatcccgatttttgcagattctgcaatctcattcatagaagcattcggtttttcaatcagcaatttggtggcctcgtccaaaatggaatgaagcctggtttgtttgattgttgtcatttcctttttcattggtattacacctcttggcgaattagtctacaattgatctagtcatccatcaaatgattggatgagattataaaattatagcatacttcctcacgagtaatactaaaagccgccatttggcggctcttagcatggttatctttcacgttacttacagttcgatgattctcgttgcaatatttgtacaaaattcacgatcatgctctacaaaaagcagggttggcgagtattccaagagtaagtcttcgatctgcatacgtgaaatgacatctacaaagttgagtggttcatcccaaatatgcagatgagctttctcactaagacttttggcaatgagcactttctttttttgacctgcgctaaacgttgagatatttttctccaattgcagtctggaaaaatccaactttcgaagtatcgatttaaacaggctttcatcaatcccctgtgtggccgcatactcagataaatgtcctccgagatcggacgtgtcctgcgacacatacgagattttaagctgatgatcctttctgaaaagacctgtataagggatatcttcaccacagatcagtttaagaatgcttgatttgccagatccatttttaccgtacaggttaatacgatccccttgttcaaccgtgatactgacatccttacacaccgtattggagccatatgatatcgacacatgttccaattcaacaagttcctgcttgtgaaaatccagctgatgaatctgtaaacgttctgcactctcgatatttttgagaagtttggatttctcttgaatcgcagattgctgcctttgttcgatatttttggaacgtttcatcattttggcagccttgtgcccaatatatcctttatccaccttggagccggaatttctcgtaccatttttggtcttttcaacttcatgcgaccatccaccggtccgtttggctgaatcggataaacgcttgatatcctttattaatttctcattactcgcaagttcaaactgatcttgccttcttttattttcccaccaagcggagaaattgcctttctgaatctcgatgttacttttattgatggaaaggatatggtccacgctgtgatccagaaaggatcgatcgtgagataccaaaataaatccactcttgctaccaagataattactgacgatttgtcttgcatggagatcaagatgattggtaggttcatctatgagcagaaaccgattatccttcaggaacaaagcagccagcatcacctttgtttgttctccgttggataacgtatcaaaaggccgatacaacacatcttctgacacttttaacaggttaagctcgcgcacaacttgccagtgtagatattcaggatgaatctcgccgatgacatcaacggtcatggctcccttattttctacctggaaaggaaagtattcaaagctaacattcgcagagatatgtccgctgtattcatatttgccaagcaaaagattgaggaatgtcgttttgcctctgccgttccttccggtaaaacccaatttccaatcggagtccaactgaaaactaacattttcaaatatattatcgtaactgccttcataagcaaaggtcaggttggtaacattgattaaagacatgcatatcatcctttttatgtgaaatataaaagtaaactgacgggatttcaccatagaacatggcatggattccctcactttaatatttgaacataatcagaatttagattcgcttatacaataaagaaacctggcgataaaccactcagcgccaagtagatctatgcataggaggacaaagtgtcggattctgattagtcatattgtgaaccatgccactgttcatgtttgttgacaggtccacataaacatccacaacctctaattcagtcatgactctatcccccctttgaaagttcaaaatttaatacagaaaacttaacatggaatacgatatgggtcaagacagtgtagcctcgatctcatcttccatccccgtaccgttaaaccattgtgttttctggcttacacacctctatgtaaattttgatgatgtactcatcgggattactttctgcaaaataagtgagcaggtccagtgcatacacatgtccacagacttgcagtccctctttttctatctcctctttcatgagggaatacgtctccggcatgctttcgtatgaacctcgatgattcatgacggcatacatcccttttggcttaatccatatcgtttcccctggaatgggagcttttattttgttgccaaagtaatccggatagtattctcctgcctcatagtgctcctgagttaagatcgtccataccggaaactcatagtcgatcatctgttcatcacaatgggtcctgtattcaatgaatttacggaagaattccttatccccatccccttgctccagttgaacagtaataaaatactccagctcacattgttcgatatgcagcccttcaggagaagcatccgtggcttgtttcgtcatttctattgcaccacttagcagcttttgcatacgtttgattcgttgctgctccaactcaagtgcctttaatttctgttcaaacagctcaattaacaatggtgtattctgattttgaataaacgacttaatctcttggagtgagcttcctgccttcttcagcacatgtatgacatccagcacatacgtttgttgcataccataatagcggtagcccttggcattggtatattcaggctttaacagcccaatctcgtcataatgaaacaaggtatgtttggtcactccgcagatcttggcaaattcactggtggtaaagtgttgtgcgtgatgtccagccatctatgggccctccatgtacatatgtagtctaagttttatcaatatacatgcattatagtgtgtaaagaaaagtttgactatagggttacccgatagtttagtctaaaattgtaagttattcatatcgtcggagggaaacatgtcaaaattcaaacgttggatgattcttgttattgtctcaagtgcactattactcattgtgatggatatgaccatcctgtacacagccctacccagcttgacccatgatctcggtgcatctgcttcggagaaattatggattctgaacggttactcccttgtcatggcgggtcttcttcctgcaatgggaacactcggggaccgtcttggtcataaaaaaatatttaccctgggcttggtcgtcttttctgctgcttctcttgctgctgccttttctccagtaccggctatgctggtcatgagcagaattcttctcgccgtaggtgcctccatgatgatgccagcaacattgtcgattatcagagttacgtttacgaatgagcgagaactcgcactggcaatcggcatctggggttccattgcatcaggtggtgctggattgggaccgattgttggtggactgcttcttcaacatttctggtggggctctgtgtttctgattaacctgcccatagccattatcgcgtttgtattcgccttgagaatgatccctaaacatcaaggggatacctcgaaaaagtgggacttcaccagttccattcagatcatgattgccatggtcggaattatctattccattaaggaattcacaagacgcgaaggatctctcacactcgctattattgctgctattgtcggtgttctgtccctgatcatctttattcgccgtcagaataacagtaccaacccactgctggatctgtccttattcaaaatcccaagattcagcaccggctttattaccgcactggttggcttgtttgcacaaatgggtgtgcaatatatggtcactcagcggcttcagctggtggaaggcatgtcaccgcttcaggctggactattcaccgtatccatacctgttgcagcactcattgccggacctgttacgggggccattatgcaccgtgtggatgttgtatatatcaaaagcttcactctcttcatcgctgcccttggcatggggacgtatctgatttatttcaatgctgggttcaccgggcagattatcggcttggcactgcttggtgcaggtcttggatcagggatgaccgctgcatcacattccattatgagttatgccccaccacacaaagcgggcatggccgcttccattgaggaagtgggttatgagctgggcggagcatccggtattgcgatcatcggcagcatgtcgacccttttctacacactcgctatgaagattcctgtgggaattagtgtgccagccaatgcgaaagacagtttggatgaagcgcttatcgctgccgaaagcttgcctgctgcgtctgctgaatcgctcaaaaatgccgcctttgctgcatttgaccaatccttctttgttgtcattgcaggtgtgaccgtatttctgttcattgctgctctgattatgagttgggttgctgtgcgattgaaacgaacccacaagcacagcgttaaaacgtaatgaaattcacttcatgaaacaaagcgaggtatatacgaaatatgtcaaaagaagaggattaactcaattaaattaacgtcaaaagccattacctgagttgtttcaggtaatggtttttgatatgcctgataaccgaagcttaccaccatgcggcacctcacggaaggtaggcatcctctacctcaacttttcgttcattccccatcgcaatgtatcttacgttaatgacatttcctttctgaaaatggggaatatgtgtgattggaatataagtctctacaattgttgggaaggtgcggccgtcaacttgggttacagtcagatccaatcgcacgccaggccttccatccctactggatgatgtctgcacaatatcatgaattattgcttctgttggaattccgtccatcagaatgctcttgcgaaggtgatgtttctcttcattgttacgtaacagtttaaatgccataatcgtagtgatcgtacctgttataagcccaaagacaataatagcaacaaaaataattaatgtgacggtcatgataacctccttttagttgaaacttatgttaactacttcttgtttagatctctttttcctgcctattctctctgaatcggaaagcttcaaagtcaaaaaagccgccttaagggcggcttcatgctgtgtatgttcaactcaacttagtctactttcgcaccatacgagcgtacaaacagaacggcttgttcgcgatccaaacgtacacctttgatatccagtgatttcagatcgatgccttccaggttagcccctctaagatcggctccttgcagtttggctctgcttaatataactcgggtaagatcacagtctctcaaatccgctttggtgaaatccgtgtccgtaaagtcagcctcaaagaaacgaattcctcgcagatcctgtttccccaaacgtgtatgtctcagattggtataggaccaatcgccctgactcagggtaatgccatccatttgcgcaccagagaagtctgagcctgtcatcttgcaggagctgaatttggaggcaaagagattcgcaccaccgaaggtgcagttttcaaaagccgattccgtatgaattgaaccattcatggaagcccctttgaagtcacactcgataaaacggcagttactcgtttcgatttcttccatagaagcgttcataaatgtacactgtttgaaaacacagcttatgagttctccatagcgcaggtcacgtccctcaaaatgtactgcttcatattcctgatccttatattgatacactggttacaccccacactgtatatttctccgtcttttttcattaaaagaactttttatactataccacacccctgtcaagtacctgcttaaacacccacaaaagtcaagttactttttttatgagaaaaatctgaagaactaaaaaagggacgcataaagcgcccctccagctcacacttttaactgttccaatgtgggcttatatatgtgaaccttccagttgcttattctaatcttcttagaaagcactacaccagtattttggacattcggtacaaggatagcgaaggtttattgatttcccctactctctggtatcccaaacgctcgtagagtttaattgctagtagattttcctttttaaccgtaagtgaagatttggacagaccttgtgttatagcttgctcctcagcaaaatgaatgagctgtgtccctacaccaagacctctgctttcaggcaaggtagccaatgttccgatatggtactcgtcgttctccgcttctttcaatgtcaccatggagtagaactctttccagtgttggagattatacttaatcaggctccatttacgaagttcaaacagtttggagaacgttggtaaagcaagtttgttcattatagtggtcggataacacatgatcatgcccagcgtttggttacccattttagcttcataagcatattggtgactgaatcggttctgattcgaacgccataacttgttaaatgttttctctataatgcctttatccttggtacctgcaagcgaataggccatatattcaagcgccatctgatttagttgcccgccgactaatgattgtggactggcttttgttatggaaatcttattcatcgctgtcactcctctaggtagctgaaattggattaaagcttggcagcgggttggttaaatgataacccctcaacgatcacattcaccgtatcaatggttaatccggtcagctgttccacatgcaatctcacattgttttgcaaatccctgcagacttcatgcacttttgttccataacaaacgacaacctttacgtttatctccagtcttgattctaccttgcggatatctatgccattttgcagacttttcccgctccactttttggtgaccccttctataagtcctgtcgacatggaggaaatctcactggtggtattcgcgatcttgccgacaattttggagatcacatcatccgatatttgaatttttcccaaaacattttgaatggacatcctaggtccccctctttatacctgcatttttgatagataataatatcatttaatataaatataaatcatgcagagtccgatttcaacttttgaattcagccgtcctcatttctacctgtacatagcaaaaaaaccgcgatcatcgcggtttcttctagtcatactatgggaattttaattgaatacagacaggaatatgggaagatgactcgtcctctgttctgccttcttctgctgcctctgtttcttctgcttgcacgatccactgcctgccaattaacgattgtagcagttcaatctcttctgcggtcagttgaatatgcttcagagacaactcatcttgaacgtaatcccgatccaccttacggtcaaaccggaaatcgagcaatcgtttcaacccgttaatatgcaaaaacttgaactcataaccttgacgtatcgccttttcccaatcgtctccgatatcagctgctgtctgtagtctttcatcaaaatccatcgcggattccttaaccagaggcaacaaacgggaatagtctcgacgttgtaaacattcaataatcacttcttttggttccccacttgtcagaacattctctacaagaagccctacaggaatggacagctgagttcgactcattgctcgccctcctcattcccgaggtactgattgaaccaggcattcacctgttggaagctatcgatccgaagtgaaggtttaccgcttttcagcaaactgtggttggaacctggataacgaatcagtttggtctttttgccatatcgttttagcgtagtatataattcctccgcttgcgcaatcggtgtccgatagtcctgctctccgtgcatgatcagaagtggcgtctcaatgtgatgtgcatgggcaagaggtgaacgggaccacaggaattcagcgttttccgccggattaccaccaatgactccctcgacataggaaattccgatatcactcgtcccatacatggacaaccagttggagatacaacgctgggttacagccgccttgaaacggtgggtatgcgctacaatccagttggtcatcactcctccataactgccacctgccacacccagacgtgaagcatcaaggaaatcgtatgtagccagggcataatcaacagcttccatcagatcccggtaatcacctccggcaaagtcgccacggcaagctctggcaaactcctgaccgtatcccatacttccgcgaggattgatccacagcacagcgtacccttgcgcaacgagtgtctgcatttcatgactgtatgtacccgtatacatcgcgtggggtccaccatgaatctgcaaaatcaatggcagtttcccattggtgtcacgtattgccggtgtggctaaccaaccttgaagcggccatccatcagaggacttaaactctacacggactggcacatttacagccaattcagccatgaattcatcatttcgccgggtgagtctgaacatttcaccactgtcgatatccacgcgatataactctccagggtgttcatccgtcaaaacagcgataaccagcgacgtaccatctgacgttaaggtatactgatacacatccttttcaccagcgcccgtcaccaattgacacgccccatcttcttgaatacggtacacgtccacattcccgttatgtgttccgagtacatatacaccacgttccggatgcttattatccatgagtggagaaggtgacgcacctgccgacttcatatctccaagcgccgcgttaccaatctgcatatctaattgaggtgcgattggcctgggtatacctcgatgaacgggaacagcgtataagctgttgtggctcccgcttccatactcacgatcactggcgatcaggatcagctgttgcccgtcggacgaataggagaattggcttatcgccagactggaatccgtcactttgaacagatcactctctcccaatcgaatgctatatacatcggtaaagtaaagcagatccgcatcaagttcctcgtcctctacttgcttcgaaatgaaagaaagctgctggctatctggcgaccacgccggagcgctgatattccatagcccggaagtcacctgcgtgatttccccgcttttgatctcatatataaacaactggctgtattgaccgtcccaccagccagccccttccgccttcggcgttgtacgctcgaagactttacctcgcagctcaggtacagactcctgttggacgtctgctttcttctgttggtcctccggttgtactttgctggtaaacgcaatgtactgcccgttcggcgaccagatataactcaatattttacgtgcgggagatatcagcatgaccggctctttttgatctgaatggagcgtccatagtcctttgccaccatccactgagcgaatgaatgtgagctgtgtgccatccggcgaccaagcaggtgaggaatcttttgttccatccgaaagtgcaatatcttcatcaccatcgagcgaaatccctcgaatttgtgtattatattcgtttttatcctgatctatggtctgttccacataagccacttgtccgttaggactgatcaccggctgacttatccaacggtagtgactcagatcctccggcataattggtctttgattcataatgatggctcccttctccgtttatttatgggttgtctccgtacgtggatcaagcacatcacgcagccaatctccaaggaaaataacaccgagtacggtaaatgtaatggctagtcccgggaatgtagcgacccaccagcttgttgcaacgtattgtctgccatcactgagcatccctccccaggatacatcaggtggtttgatacctagacccaggaaactgagtgaagcttccataataatcgttgtgccgacattcataccgcagatgacgataaaggatgaaaggatattcggcagaatgtgtttcagaatcaatcttccattcttggcaccaatcgatctggccgcatgaacaaaatcacgctctttgatactaagaacctcacttcttaccacacgggtgaatggaacccagttcgtcaccccgataacaaagatcaacgttgtaatacccgggccaacaatcgccatcacaacaagcatgaacagaatggttggaatcgccatgaatgcatcacctacacgcatgatgacagcatccagccatttcccgtagaatccggataccagccccagaatcgcgccaataattcctgacacaatcacggcacccatccccacgattaaggaaactcgggcaccatatacaattcgactccacatgtctctgccgagattatcggtacccagccagtattcggccgttccgccctcaagccacgctggtggtttaagtcggcccagcggattcaccgctgccggatcatgactcgtcaatagaggtgcacctatggcaattaacacaaccaacaatacaagcacagcaccaaacattccggtcttgctgatgatcagttgttgccagatataacgaaatcccgttggtgcacgcccattgtcttgttcctgttctgtacccggaattggcatttcattgctgcctgtcatatgattgcacctccttctagtcgtatttgatgcgcggatcgagtagcctgtaagctacatccgtcaagatgttgattactacaacgataaaggcaatgacaaacaccgctgcctgtacaatcgccatatcatgtgtgttgactgcaacgaccagcaactgacccagtccaggccaggagaataccgtttccgtaatcaaagtgcccccgatcagacttgtaaactgcaaactcataattgtcacgaccggaatcaatccgttccgaaatgcatgttttacaatgacaaccatccggccaagccccttgctgcgagctgttcgaatatagtcctggttgagaatctccagcatgctggagcgaatcagtcgggtcatctgcgcagccagtccaacgccaagtgtaaatgccggcaagatcagatgtgacaatcctccgcgaccagataccggcaatacgcccagcatgacggagaacaagaggataagcataatccccatccagaagtttggcatcgccttaccaatgacggatattcctgaaataatgagatcggtaaacgtattgcgtttgacagctgaaatgacgccaagtggcacagccataagtacagcaaaaatcatggcggctacagccagttcaaagctggctggcaatctctccagcacaagctctaacgcaggctgattgtagcgaaaagactgaccaaagtctccctgtatcgcactgcccagaaacttcacgtattgcgtatataaaggctgatccaaaccaagtgcctgcgtcaagacagcacgatcttcagcggtagccgtttcaggcaacattagcgcaaccggatcaccagtgactcgaaccaaaatgaatacaattaatgaaacaatgaacagcaccggaatgatctgcagtaatgacttaagtacgtatttgcccattccttgttcacctcccttttaaaaaagaacggcaggaacatggttatccagtccctgccgttcacggcctatcttttcaatgaccggttgttatacccgatgttactgtgcaacaggtgtaatctcgtcagcatagaacatctcgtcactgcgtggcgcgaagttcactttagcatttgttccgtagacaccttccatttggtacagatatacggctgggcgttcttcagagaagatctgttgtacttgctgatactctttctcacgagacgcagggtccatgttcaccaatgccgattgaagcagtttctctacttcaggattgttgtaatccgactcgccttttgcttcttccaacatataacgattgtagttattcgaagcatcgaacaaggagttaccaataccaatcatgaagatttctttgaatgattttgaactgtaacgttcactgaatgcacttgcttccaggacatccaggttgattttgaatccggcttgttccagcattgccgcaacaacttcagcctgttctttgtattgtgcggaaacggagatagtcatctcggcttcaccttccgcatagccagcttcttgcagcaactgtttggctttttcttgatcataaagtgacgttttgtacaatgaaggatcagcaccgaagttgcctggtgttacggatgtgcgggttacgatacctgctccgccggcaatgctgtccacgattccttgtttgtcgatagctaggtcaatcgcttcacgtactttcggatcagctgtgatgctgccttctgtctgacggaagatcaactgaagcacacgctggattggcgctttgacaatctttttatctgcttcgccttcgatccgggcaatgtcagtggacggaatggaagacgccacatctacaccaccagcaagcaattcggatacacgtgtggaggcttcaggaataacgcggaataccacttcattccattttggttcaccgtcaaagtagttctcgttttttaccagttccacacgatcatctttggtccatttactgaacttataagggcctgtgcctaccggttgtttcaggaaagtatcgaatcctttatccgcaatatattttgctggcagaatgcctgctcccattttggacagacgattcaggagcaacggatctggaccatctgtgatgatatctacggtatagtcatccaccactttaacttctacgatatttttgaaataactgttttgtttcagtgtctcgtccttggctacgcgctccagcgtgtattttacatctgctgaagtgaatggatcgccattgtggaaggtaacaccttcacgcagcttaaatctccacgttgtatcatcgacttgatcccatgatgtcgcaagtcccgcaacttttttctgttcactgtcatttttgatcagataatcaaaaacgttgaccagaaccgcctcactggaagtattgttgttgttgtgcggatcaaaactctcaatatcggttgccgcagcaacggtcagtgttgtacttgcgcttccactgcccgttccttctgttgcggaaccatcatttgtgcttgtcgattttcctccgcaagcgctgagtaccattacgactgccagtaacgtgatccacaagcctgtccattgtctttttttcattgtaattgctccccctcagaagttgtattccgtgccaaaaattcaagtgctactgcggacaacatgcccacaccataaggcatcgctgtctcatcaagatcaaacatgggatggtggagtggatagcgagtacgttcctcatcattcccagatcctagtctgaaaaacacacccggaacctgttcacaataaaacgcgaaatcctcgccccctgtggagggtttgatataagtccatcccttctccgcattaacctgatcacaagtctctgttagcaggtcaaccatgccgagatcattcacgacaacagggtatccatcgccgtagacaacttcgcatcctgctccgaatgaatcacagacccctttaacaacctgctcgatcagagctggcatccgctcacgaatggcaggtgagagtgtacgaaccgtaccgatcatctccacttcgggggcgatggctgttcccatataacctcccgtgattttgccaatcgtgactactgccggttcaagtggatcaaccatccgactgacgatattttgcaatgcggtgatgacctgagcggataccgcgattgcatcaataccctcatgcggacgagctgcgtggccacccttgccaaacaccttgataatcaagggatcagctgatgcaaaagcaacgccctgacttacgcccaaggttcccgtgtcctgtccaggtgtcatgtgtaatcctgcgatggcatcaacctttggattctccagaacgccgtcctggatcatggctcttgcacctgcaagtccctcttctgctggctggaaaataaatttgatgttgcctgacttcggtcttccaagaccagtaagcagttgggcggctcccatcaggatggaggtgtgagcgtcatgcccacacagatgcgctttgccttctacttgcgaacggtattccaccgctttctgatcctggattggcaaggcatccatgtctgcgcgcaaagcaaaggttggtccgtcggtctctccgcgaagcaggcctgtaaccccggtctgtccgacattgcgtgtaacttccaaccccaggctttccagatgctcagctacgatagcagatgtgcgatgctcctcataaccgatctccggatgctgatgtaaatctctgcgccaagcgcttaactgggcttgtagtggctgagccagctgtattagttctgaacgattcattcgctgtcattcccttcatttttgtccgattcagaaaccaaacgggcatagattgcatccgctgagaattcgatatgctttttcatcgtctccttagacttgatgctatcatgggctttcaatgcttcaagaatctccatatgtacaccgtggttgacggtacgtatccggtcatcatagggcatcaggtcgagagccggattaattttcgtccgaatctgtctgacggctctctcacagtatggattccccgaagccttggcgatggtcagatgaaatttcacatccagcgccctgaaccattcccttgtgcagtctggctctatactttgctccatgtaaccctcaagcagctccagttcgcctgcggtgatccgctcagcagcgagaaaagctccctctggctcgatgatggttcgaaattcaaacaccttcagcatctgtgaccaatcccgtttaatttcttctctggtccgtttatgcgaattggctgtcagaggcagtacaaatgttccgcctttggcacccacccttttctcaatcaaacctttctcttccagtgaagagagtgcctcacgaacggtaatccggcttacgttaaaaatctctgccagatctcgctcggctggaagctgttcttcactcaataattctttcaaaataatggcttcttccagttgttccctaatgaattcactaacctttttggtggatactttctcaaaacgaaatgaaaacgtactggacatctaaacactccgatctgtatatggtctagaccttataccattaatataattccgactaaacttatatgcaatactttttttcaagtaaattcatatttttttcttatcacctccaaattgaagcattttggcacaaaaaagacgcatctacacacagcagatgcatcttcgttttcgttatttgacgacatacgggcactacgattacagactataactttttattagcatagggtctaaaatcctctgtaaccgcaagttttctgcttccctccaggtaaaagctgtcatccgctctccaggtatgactctttttgttctgtctgcggtgatagacataattgtatggtgaggtcgcgtaagctttgaaccctcttttcctgcactgtctcaggaaggtcacatcttcccctattgaacggtccgtgaagcggacttttttcaagatctctcttttgaataaaatagtacccccttgtacaaattcaaccggtttatttttttcagcaggagatctgaccaacaatgtcttggatgcgcccaaatagacgaggcacgaatgtttacccacaatatcacttttggtccgtctaagttctctcacctgctctgttaaataatacggcgaatagtagtcatcatcatcaaatttggcaatcaacgaaaagcgtgcccttgtcatgccagcgttcaggctttgtcctagggaaatgctctccggaacttgatatacatgaacattggcaagattccgaacccggctttggtataatgccagattcatactgtcatgattcaggacaatgatcagctctttgcttttataacgctgccgattgtaattttgcaggatgttatcaaaaaattgcggccgattggtacatacaacaatggaaacaccatgacccgttttgtgtttagtcaagacataccctcttttcagctcatttttctctcatcatatgtgccgaaatagagtctggtatggaccaatagttagggcgtgtctcaaaactcgctgaagtgcatcttttaccgccttttcgccccctgctgcgtcacttccccttgacgtgccccggcacgcctgcggaaaacttcctggcttggaacgaaaattcggcaaaatctgcttccttcggagttttcagatacgccctagcatccaaaacaccaaaaaccctctgccccaaataacaggacaaagggttttgtaatctattgttttaagccttttctatgcttcgttaccgttattcaagtacacggccttgcctgtgcgagcagattcatagagtgcttccaagatctgagatacaaccagcgcttgtttcggtgtgaccaccggctcctgatcgttctcaatcgcttcaatccactttctcatctcaacatccggtgcgctctcgctcttaccatcgtagaaagctaccccgcctgcactcagttcaatctcattggtgtatagacggctgaatttctcaccattgatgcgcagtccgttcttcatatccgcacccgcttcgctaccgctcaagctgcatttcgcctcatccacatccagtgagttcagtgcccaactggattccagcatgatcgttgccccattctccattacaatcatgccaaaggccgagtcctctacggagaattgtttcgggtcccacgggccccaggcattggccgcattttcacgttgtgaaagctcatgataggtcgtacccagcacaacttttggttgatagttatccatcatccagagcgtcagatcaagtgcgtgcgtaccaatgtcaatcagcggaccgccaccttgcttctcttcatccaggaaaacaccccatgttggtactgctctacgtctaatcgcatgtgctttggcaaaataaatattacccaagtcacccgcttcgcacaccttcttcaagtactgactgtcttctctgaaacgattgttatatccgatggtaagttttttgccggtacgttctgccgcttccagcatgagctgtgcttcagcagatgtcttcgccattggcttttcacacatgacatgtttccccgcttccagggcaccaatagaaatctcggcatgagaaatattcggggtaagtacatgcacaatgtccaaagactcatccttaagcaattcctgataatccgtgtagacttcggcttcagtagtgccatatttctgtttggcttcatccgcacgttcctgaacgatatcacagaaagccaccagttcaacattatccagtttactcagactcggcagatgtttgccattcgcgattccaccacagccaataattccgatacgatatactttactcatatataatcaccctcacttaagtattggttgtttcattttacgaaaagccgacggggtcattcccagacgtttgcgaaatacagcatgcaaatagttggcattattgaatcctgaagcaagagcgatctgttcaatggatacgttactttcctccagattgcggcacacggcgcgcagacgaatatcctccagtacacggctgaacggcatctccggctgtacttggtagaagattcgctgcaattgtctgctgctgatatgaagtttctctgctacatgctccagcgtgaccactgtagggtgattcgcttccatatactgcactgcatactcatagcgatataccgacatatcccgcacaggggcttccggtcgattccccccggtgtcgtatgctcgcacggttttgagtaatatgctgatgaccagttgcttgatcgatgtataataacctaacaatttctgatcacatgcctcataggcttccaaaaaacaatgcattgcccgatgataatcattcaccggagtaagcggaagcgttctcagcttttccatcgtttcctcggattctgctgcttcccagggatcgacatgttctcttggcttgtgaacgatatccacatgaagacatagttcatccatgtcctctttggcgtctgcctcttgataatgaacgacacccggtcctgtcaaatacagcataccttccgagagtgcatgtgtctgatcatccagaataactttgcctttacctctcgggataaaatgaaactcgaactccgcatgattatggaaatccacaactcggcccgctggaaaagaagtcagatgaaatcgcatcacacgaatctcataatgtccccaaaccattaaaatatccagtctctccaggagatcctgccgctcaagcattttctcataaggatacaggctcaagattgcacacctccttaataaaacctaacccttcaactcattcagagtgattctgcgcccttctttggcagagagattcgctgcttccatcaaacgggtaagctccatagcgatctgcacgttttcagttgcatccgtatcattctgtatatgtgcaacccattgattgaatgcgctttctctttggtctgccaaaggaagttcagtccagtcatcatactgtccctgtactgctttcgtgcgaatcaataacttttcatcaggtgtcccatacagaagtgtaccttccgtgccatgaacctcaatcgtaaacggagaatggctattcacaaaaccggcttcaacaacgccgactgctccagaatccgtaaacaaggttgcgactgcattatcttccacttctttgcctgtaatatatccgaagttggcgttaaccgcagttacttcctgaccaagaaacagtttggcgagatacattggatggcaacccagatcaatgagtgcaccgccctgacaatccttcagttcatagaagtgttcaggcaaccagttggaaattgctccatcatgtgataaacgcgctctaacataagttattttaccaagtaatccttggttaagtacatcctgaatcgttaacgtataccctgcattcagacgtggcaaggagacagtcattttgaccttgttggcctttacctcattaaggattccgttggattccgcctgtgtcgacgcaataaccttctccgtgaagatgtgtttacctgcttttgcagcagcggtgatcacctcttcatggatgcgagttggcgcatctacaataacggcgtcgatgtcatccttggccaacatatcttcgagtgaagcatagaatggtacgtttaaacgttcagccgcttcctgaccacgcttggcatcttcatcccatacagcggcgatgactgtatcctcatgttcctgtgcttgcttgatgtaatcccatgcgtgaacatgccacaaactaatttttccaattcgaatggtcaatgtgtcttacctccatactatataatattctgacatttatctataagttatcacagacttaatctatttttaatagaaactcgcgacaataaatgtataaaatcacgacatgaatgttattagacatttatacacttgcccatatttctgatatattttacataaccaggtcgcataactatagaaacctcctgtctacactatcgtgaacaggaggtttctatagttatgatgttcaaaaatcaactcaacgtaacgcatacccctgtgtaacgattttgtacccggataccttctggctgtgcccctccaacgtgttcttaacccgttccagcacatcgctctcataaacggaggctgtttcgaatccaggctgtacgttcaactcaacggtttcggagttcagattataccagcgagcaatcaaatctccggtttcctctgcgatcttcaatgtggagaaggctaatgacgaaccttgtgcattccatgccagccattgcttcgacagaggcagttcaacctttttcccatcagttccggcatgactttctcgctcaaacgtgcgtgctagtgcccctagctgtacagtcgtccacggaatcggatacacgtatgcggatgcacatgcacctgactgtgccgcatcgcccgcaaatggaataatagcatattccacactctgaggtcccagacattgggcttccggtgtttcaaacacaccccaatctcccagttccgaagaggcacgcagcagcgtaactgcaatcgtactgccctcttcatgctgtaaaatctcgtattcattcagccctttgtttgcaatcatcaagccatgagcaccatcggtcacatgtacaaatgcttgctgatgctgtgcattactcggattcacccattctttggccggtgtattggagcgtttggcaatttcaaagatcgaatctgcataatgatcctctgtcaccagtcctgatggaaataatgcacgcagtcgatgatccttggcctgattgttaaagtcagattttaccttgaccatattactgcctgcttccaatgtatacgttgtcgtaatcaccaggggaacagtgttctcgactcgttgcgccttccgttctgtaaaaggaaccatttggcgcttctccagctcgaacagttcatctgctccagcaggaatatcccagcgtaatacactttccataactgcccggtacggagactgctccacaatccgcaggtctgccttcagatgctccgtggtcagcgttgtctctccctcgggttgacggtagacatattcattgccgatatcaccggtattctcatatgaattcaatccctggtatacagcacctgagaccttatcttcaatcgttgccgtaccattctcttcaaccgtcacccgcaattgaccgttctccatcatcattccctgaacctggatgagttcgctcatatcgggcacttcagcaatctcagcaatctctgcttgcttctctactggaatgaaagcatatgtcttatatcccagcgaaggtacatccaccgcttggaaagtcactcttactttacgagccatataaggctgtcggaagcgatccttcggaagttcatagccaaaatgcgcacccagatccttgatttctgccgaatacgtgcgtccatctgaatcgaccagctgatacactggcagtgcatctttttccaccttctgcgcaagcgcctgaggattaggaccttctgggaaaaatgctttgtccacaatcagatccatctcaatgattccatttcgattccacccactcgtgttgaacacggtgaacagcaccgcttcctctccccaagcctcagcaggttgcactagtatagactcagcaatcgcctgcgcgctctgggaaaccaatttctctgcaagttgtctgctcttggcaaagcgggtcaccatctcacgatgaacctcatcgacactgcatccgcagatgctatcatgtgggtggttctgcatcagcatcttccatgcatgcgtcaatagatgatgcggataatcttttaccccggctatatgggccatggcggcgagtggttcggctactttttcaagcaacgtctgcccctgctgattcaactgtttcagataaaccctggcagatgccgtattcaccagtgttccccaaccatccgtgtgctgactgcgaagctcgccctcaatggtcgccagatgttcaggcacttccttcgtaaccgcctcaatgtaatcgtcaaaattggagtgaataaattctacatcaggatacaacgcagccgccgtacgtaaagcctcaggcagatccgtctggatcggctggtgatcacaaccattcatgaacaacagatgtggagtcgaggcaaacttctcggcatcctccagatttttatcccaataggctcgggctttctccgaatcaaccggaacctccatcccattacagtaccagttcgcgaacaaaatgccgagcacttccgaaccatccggcgaacgccagatcatctcggaatagggagattcgtaactatccgcatcaaccacggcattattgaatccggtaggctttaccccgcgcccgaagatcgcgttatgaatgtccgcctgttgcagaatctgcggtgcctgtcccatattgccgaacgagtctgggaagtatcccgtcttggatatcacgcccaaaggtcgagcatcacgatgaccgatgagcagattacgcaagttggcctcgctgctggtcagaaactcatcctgtaacacataccatggaccaaaatgaatgcgtccttcacgaatataacggtcgagcctctcctgctgttcgggccgaacctgcaaataatcttcacgaataatcgtctgcccatccagatggaaatagcgatattccgggtcctgatcaagcgtgtccagcagtttatccatcagctcaatgagcagtacatgatggtgttcataaggcatataccattcgcggtcccaatgggtatgcgagatgagatgtgccgtctttttggttgtcatgttgcgtacctcctgtcattaacctttggttgccccgcccatgctgaatcctttggacatgtaacgctgggagaagatatatagcacaaccgaaggcatcgtataaagtagtgaaaatgcagccaacctgccgtattcaaccataccgtggctgccgaaaaattgataaatcgtgaccgatgccggaagtttctccggtgtctggagcaggatgtatggcacgaagaagttgccccaacttcccgaaaacgtaaatatcgctattgttgcaatacccggcaacatcaatggcgccacgattcgtctcaaactactccacacggacgctccgtcaatccatgccgattcttccaaatcgattggcaccgaatccatgaagtttttcatcatccagatgccgtaaggaagtgaggatgcggtcaggaacagcatcgtggcgatgatgctattttgcattttgaagaacagaaacatttgaaataccggaaccatcacggcagtaatcggaagtgctgtcatgaacagaattgataacaggaagctttttttgaatctcatttcataacgggataaaggataagcagcaaggaccgataccagaacaaccaatatcgcttgccctcccgacagaattaggcccacaccgaatgaacgaagattgctcgaatccccgagtacatccttgaaattttgaatggtccaggtactgggcattttgataccctgttgcgcgttcgggtcaaatgaagccagaatgatccagagcagcggcaataaaaaacagagccctagaaaaactaaaatcccgtactggattttgcgttgaagcccatgtttgaccatagggatcgaacctccttcatggttacactttcactttcatggatcgcatgtagaacaggctggcgataataccgatgaacaacagaaccagagatatggctgtgccgtatccaaactgatagttcacaaaggcctgattgtacatgaagatcggtaaggtttgtgttgaagtacccgggccaccaccggtcatcgtatagatcagcgtgaacacacccagtgtctgtagggtgaccaacatcatattggttacgatggacccttttaccattggaatcgtaatgtgtctgacaatctggaacccggtggcactgtcaataatcgcagcttcttcaacttccttcgggatatcatccagtgccgactgatagaccatcattgaaaaggctgtgccgtgccagatatttgcgataatgacactcaccatagggaaactgaacaaccaggagaccggattcgctccaaaccagccgaggatctgattcaatgaaccattgtcactgaaaaaggcgaccatacagaatgccacgacaatctcgggtgtcacccaacccgcaatgacgatgatcccgatgacccggcggaacgtcacatttttctctttcattagaagggccagaatgaacccaagcaacacctgaccaatcactgcggagaagatgagaaagaccagcgtacgccagacactaatccggaagtccggatcatggaacatattaatgaaattctgaaatccgacaaactccaaactcttggctgccgccccggtcagagccatattcgtaaaggcaaaacagatcgtcagaatgatgggaacaatgaaaaacacaagtaataacagtacggaaggcatgagaaacagaaatgagcctggtgctttccttttcataagtcactctccattcgaaccggaaaaaggggagattatgcctccccctccgaatatatcgatatccttatttctcttcgatgctgtccgcgccaagggaacgggatacgttgtccttcaattgcgtaactccctcttccggcgtcagcttgccagaggcaatactctcaacaatgctttgcaattgtgcggataccgctgcatattgatcgttcgctggacggaagtgggccacattcaagagttcctgtgcttctttggtatatggacgatccgtataaccttcaacttccgtggaatcgttacgtgggctgaggctgccttccgctactacgcgtgcagtcgcattttccttattcatcagaaactcgataaatttccaagcctcttccttgtttttcgcctgtgcaggaacagaccaagcccatcctccagacatcgtagttgctccaggttcttccccattttgtgttgggaatggtgcaaagcctattttctcttcaacgttggcgattggagcagcaccgttctcggcccatgtcgaacctgcccagctaccatctacagccatcgccagtttgtcttgcgggaactgttgctggaatgcaatactgccagcttgtccattcagggcaacctgcatggttggacctgttttatccgtgttaaaaacttgatctatgaatttgaaggaatccagtagccccgggctgttcacgacccatttcttgctggtgtcgttatacagcgtgtccgccgtaccatagagcagcatttccagtgtttgcatggtgacaccttcaccgtttgctttgcccacgatcatattaagtggtgtcacacccggcagtttttgcttgatcgtacgtgctgcttcgagtacttctgcccagcttgcaggtttgaacggaacttcaagtcctgcctgttgaaacagttccttgttgtaccagattccgcgtgtatccgaggtagccggaacgccgtacactttgccgtcttctccggtaacccctgccttcaggttgtcgataatgtgttcttcccaatcgggccatccctgaacctgtgtatccagcggctccagatatcccgcagcagcatcggatttgatgatggacgtatcttcggcaatgacatccggtgccgtatccggggatttcatttgcagaaccattttggacgtataatcgccttcacttgccagtacaggcgcaatgttgattttgatatccgggttttctttctcgaattgatccaccaagcctgattggaagaatttcgtaagtgtatcttcagatcctgaagaacggaacgatacagttacttccttcttgccgtcactggttgtgcctgtgcttgagcttccgcccgaacaggctgtagtaagaatgagcaaggatgtcataactgctgctaccggcattttcaatgatatttttctcatgattcgctctcctcttgtcggaattcaacgaactccgatcgttatgatgtactcgcaggttatctcttgcttccctatctatttctgtacgcggaatccgcaataatccatcatcagttcactaaagagcatgttggaccatgaaaaccatggacgtgtatattcatgtggattgttggccgaaaaaccttcatgggtcagtccggtatccgcatccgtcttatggatgagctgaagcaatcgtagtttttcattgcgatcctctgtagtcagcccctgcatcgataaagcgatatgccagatgtacccttccggtgtatgcggactccctattcctgctgctgctgttccctcataaaaatacgggttgtgcgaggaaagaatgaaacggcgtgtattctgatacacctcgtcgttctcctccacatatccgagataaggtaaagacagcaggctcggcacattggcatcatccatcagattgtgatttcctttcccatccgtttcgtacgcatatatggttccatattccggatgttcaacggtgccataatcctgaatacctttgttgatctcttgctccaactgcttagcagtcgctgccagcgtttcaacctcgaacaccgcttcagcaatttcctgaagatatcgaagcgccacaacagcgaacatattggatggaatcagataaccatattcacaacgatcgtcgctgggacggaatcccgaccaggtcatgcctgtgtaagctgtttcagtacctcgcccctctcgggtgagcgtatcggtttcgggagcatccagacgttggaacgtgtagggtgatttcgtctcatgatgttgctccacttgccataactgcatgatgatctgggctgctttacggaacgtatcattgaattgagttgttcttcccgtgttcttccacaagagataactgagctgaatcggataagccagtgagtcgatctcatacttccgttcccagatccaatcattcatctgcgtcaggtcttcctgatgtccttttccactctccgtctcattaaaagcgtttgcataagggtccaggagaatatatttcagttgacgttcaaccagtccagcgatcatgtcagcgatatcttcatcctctgaagcgagaaccagataaggtctgacctgagcggcagaatcacgtaaccacatggcaggaatatctcccgtaatcacaaaagttgttccatcttctttgcgctgaattgtagtcgccatcgtattggtaaaacaatttttgaacatttggttgagttccggatggtccggcatacgttgcttaacctgatcaatcatgtcgtatatcgagggggaaatttcttgattatctctgggtgtcagcatgttgtcctccttatgtaatccagtttgttaaccgctttcatcatcctaaaacgaatataatgttatgtcaatatatttatttgtatattagcatgttattttaattcgaagacatcaaataatataccatttaaagcgattctccccattttatccgcaccaaaaagaggcctcgtctatacgaagcccctgattgaacacaatgaatattaagttgttataattaacccttttgtttcaccatactcgttgacttacccttcaccaatcgggcaggtaaaacaactctgttcactgtcatttcgttgttctgcatactttgaagcaccatctcgaatgcctgttttcccatatcaaactggctttgtctcatatgggttacacggcttccttcggcagcatttggactgtcaaagcaaatgatggacaactcttccgggattctcagaccaagccgatccgctgcctgttctgcaagtaaagcaatatgatactccgcagcaaagagtgcagtaatctggggatatttctgtaaatgttccaccaatgtctccacatcacggacctcgacttgaggatcaaacacacttggcagtgtcgaaagaaaagattctaaccacagttccctgttcaccagcaccccttgatcatgatgagcctcaatgattccttcaattcgttcttcaatcggtgtagtgttcgccggaggctgcgtcagaaaagcgatgtgtcggtgaccgagatcgaacaaataattcatcccttctcgcgccgcgcctacattatccgtactgacagatgaagccggaatgcctttcaagtaccggtcaatcaggacaaacgggaatttgttaacgaccagtttaagaatctcatcgctgaaatattcaccctgtgccgggaaaataatcaatccgtccacacccagttccagcaattcctgaatgctctgttcctcctgttcgggaatcccgaaggagcgtctaagtacgagaaaacaatcatgctctcgtgaagcttcttccatcccatataacagttctgtaccatacatgtcactgaaattagtaatgaccagaccaatgagcagcttcttctctggatctttaaccgaagcacgcggagcaggtctgttaggtctttcctgtaacatatctgccgtatcagcaacaaaagaaccccgtcccggctgacgaacaattaattgttcacttgccagcatctcaagcgcttttttagttgtaatccggctaactccgaattcatcacataattccttttccgaaggaacacgctcacccacttgatattgatgaagctgtatccgttcgcgcaaggattcaaagatctgttcatacatcggcttggatgccgagtctttccccaatacaagcacctccataaatacccatacttctcatgttctacatcctaatatatcatgttatatcattaatgtgaagaaaggagacaactcacctgctgtcatatgagagcaaaagaaaaagcatcccgatggatgcttcattaatcttaggcgtcagttgtgaatcgagacaacaaaaagccgacaagccctgatacctcggcttatcggcttcttgcttagatggtcaaaacgtagttaacatccatgtcacactttgcataattaaggttgaagaccctcagcggacgatggacccacttccgtttcagtctcttcagggctcgaatctggttctggaactggttgttcttgtgctgcgctgacgaacaatcgtccagctgcttccgcctctactttgttgcctgctgcatcctgagctcgaatcacaatgactccaccatccagaacaagggatgaaggtgttgtgtacgtacccgtgtaacgaccaggttcagtctctaccaatggaatctctcctgccccttgggcatccagattcaaaggtaactgaatacggaaagatgcttgcagaccaggtttactgtcaaatgaaacggtaacactctcccctgatgtgattcgaacatcctcagccggagtaatattcgtaagttctggcaacgccgtttccacatagacggtgcgggttacggttgttttgttaccagcgatatcggttgctgtaatggtaattgtgttctcgccttcattgaccaatacacggtgactgaaacttctgtctttacccacttgtacggtttgtccgttaacggttaccttatcgaggaattgttccacgacattacccgttacgtgaaccacttctgcattgatgcgatccccttgagctggcgtgagaatcgtcaattgtggtttggtctgatccagaataatgactacggggagtgaacggtccgttgttttaccatctaccactgcctccgcagtaatcgcattaatgccagaacggagcttcacaccgtatgagaacttcccatttgccaccgttgtggtggcagccagatccttgccgttgtagatcttgatctgagctccagatgccggagacgttcccgacacagtgaaggtcgattgattcgtatacgtgttcgtaggggctgtgagcacaggtgcattgaccggatatctcacaactgcacgaatcatgtagttaccttcttctgcaggtgaagtgctccacgctccacctactcgctgccagcttcgacctgcatttggaccatcctcatcggtagcgagtcccggagcgctagttccagctaaactctgtacatacacgatatagaaatcacccgttacaatgaccggttccgggaattcaacagttgtccattgatcgttacgaagtgcagtaccgtcaaatggtccagccagttgtcgtcccggagctccgcccgcacccgatgcatcatatacggcatattggaacgctgtgcctccaggtacaggccattcggtgttccagaatcggaacgatgcacctgtcagttgagcggtctccagctctggtgtcattcgaactgcccaagcgttatccgcagcattaaaagctcgtgcgttctctgctgatccatcatcataagcaatttcccctgggaaaccgatgaatggtttcaaggcaatatttgcctctgctgtcccattaccaggtacagttatagttacggttttactgtaataatcagcagcccggatggacaaggtataacttccttccaatacctgaatattgaagctgccatctgaacctgtgcgaacttcacctacattcgcatcttccaccacgagaacggaagcatcagccagtggttgtcctgtccgctcatccgttactacaccttcaatctgcccatgcggaattgcttccagattaaagttggctttggctccattgccatctgtaatcgtcacctgctgagttcgaggataatatccatatgcttcagcttttaacgtgtaatcacctgctacgtgtgtgaagttatacttgcctgtagctggatctgtcttcaccgaacgtccggtttccagtacggtaaccgttgcacttgcaggcaggctttgtggattaaccgaacctgttcctggtttttcaacttcaggttgttgctgtttcgttttgttaaattccgctttgtctgtccgcgaaattttgtaccatggattatcataggacggttttggtttgtcattgttaagcacaaccgcactgtcctccgttaccgtctccgcagcaacacccagtacacggaaatcatcaatgaaccagcctgtcttcacaacactgttatctgaggtcaggcggaatcggaattgaacttcattaccggtaagtgcatccagatcataaaatacgggtgtccattgtttaccgtttgtactatgtgagaatttgcccagttccgaccatgtggttccaccatccttggtgacttccacatacccgtagtcgtatccactctcaatctcgtaccaatgattaaacgtgagtgttccttcagacacatccgtcatatcaatgaccggagatacgagtgaatagttggagccactctcgtacgtattgtcgagatcagtcgcccagacattcggtggagaaaccacgctggcaggtcccgttaccggaataccgcgttcccactcatctttggttcctgaatgagtccagccgttatcatcactgccatcgaaatgatcgatgtagatatcctgaggcacctctacggtaatggagacctcattcgatttgtcactttcattgccactataatcaagtgcggcaacggtataataatacgtcgaatctgtcaccgtagccgtatctgtaaacgttgttcctgttgcagttccaatggattcataacctgcacctgtggttgtggagcgatatacgatataggattcgagatcctcatcgctcggacccgtccagctcaaggctacattaccaagaatatcggctgtcgcagacaatccggcaggagcgcccggagcaatctcatccagttcttctacagcgaaatcatcaatgtaccagccagccttttgcaatgaattatcgctcgtcagattgaacttgatgaacacctgctgtcccgcgtattcgcgaagatccacatattgtgtcttccaattgccacctgtacccgtgaaggttaacagctcttcgaacacataatcgctatcctcggaagcgatgtataccttgccgaagtcgatgttattctccaggtcataccagtgcttgaaggataataacgccccttctggactctcggttagatcaataggcggcgcaagcagatatgcattgctattagccacataagttccttgcagattggttgcaatcaccttgtcaccggagtatgcacttccaggaccactgcttggtgctccccatacccaggtacttccggttccgccagtcgtgaagcccagctgatcttcttcaaaatcctgaaggtatcctggcttcacaccattggacacagccactttatatacctgactttcgaatccgttgttgccgtaatcattcactcggatataatactccacaccttgcggttcaataagaaaagcagggattgtcgctgtatacgtcccatctttgttatctccagcaattcgattcatcggcagatagacgtactggttggtacctgtcgttttggcaaaagcctcgacggagactaccgcgacgttatctgtcacatgagcggttaatggtatatcaatgcctgtaaaggctgaattgacaggggtatgtgccagtactggctcttccagatcatctccggctgtaaccactctgccggatacagtgccaattccttcgagtacagaacccacagcatcaagggcattaataatgccgtgaccgtagccgttattaggagaggtcggatactgaccatctgttctcggcgtggctgtatctgtaatgatctgctccagctgatccaccgtaagggaatgattggcctgaagcagcagagcagcaagcgcagttgtatgcgggcctgccatggacgttccgttccagcctccctcatatacaccgcccggaactgatgaacggatattcacaccaggggcagatacttccggtttgatctccccatacggggatgggcccagcagggagaacgaagccagatttccgttgatatctgtggctcccgtggcaaaactttcagggtaattcgcagggttcgcaacagagccgggaccacccggattcgtcagtcttacattacctgcggagaactcgggaaagatctgcgcatcacgccaagcttggaccataggacggaaccattcatccaatcctgcgcctccgccccacgagttgttaacgacatccggtgcaagttcaggatgcagattaccttccgcatccaccggagcgatcaaccattgtccgccatcgagaataatggcatctgttgtttccggattgaatatccgcacaccaatccattttgcaccgggagcaaccccgatctggttggtaccatctgcttcggagccaaccatcgtacccatcgtgtgcgtaccatgtccgtcttcgtccgcagggagggaagcattactgtgcggatcataccagctcagttcgggatcaacgatattgcccgaggcatccaatccccgccatttgctgcgaagcgcagggtgagtataatccacaccgctgtccagattggcaacaacaatccctgttccatcgatgccccgatcccacacggctggcgcattgatgtattccaagttccattccacgttctctgtcgcaagcttgtcctttgcagcaggctctttgtctttgtctttgacaccgactgaagagtctttagctggcgtttggacagcatctttgcctggtgccgcattcgccggttctttactcacttcagctttctgtaagtatctcgtctcattcggtagaatcttctccacctcaggcagcagcgcaatctgttccatgacttctttggtactcgttactgccagtgaattgacgataaaatagcttttatattcttttaccttgcccaggtcaacttccttttccagataagtttccaatggatattgtgtacgcgaggccgtttctcgcagagagctgacgaccgaattacgaacggacagctttgtggctgaagccgtttgtttggctatggtcgccttttcaagggcctgtttggagactgctgctgtatccacctgttccttcattttcaccagataggtaacatattcactaccatcaaattctttggtcaacttggcgtttactttggactccgtaactttggcaagtccagatttcatatccaatttggatgatgtggagttttcagctgaaaccggatgaatgatcgaaaatgcaaggagaagcgagagccccatggagatgggcttgcgtaaccgattaatctttatcaaacttttccactccttttacccggttttttaatttagtctggtacatatgcccttctctgcagaatgaaacggtaaaataacctttattgcggacgaaatagataccctggatttcacataaagcctcacctcctttacaggtctggttagggatcaatatgagtcagaagagataacagatcagtctatgatttttttcttggaagtttaggagattgaatgaatcggattaaaccatgtaagtgaatagtttgggtgtttgaatcatgcaatgagagtgaatgtctataagcattcatgtggaagggtaacctggagcgttagcagaacgcttgctaaggagtggtggatatgactttcgatcgtaattcgagtgagtagttaaacattttaattacatataatagtcgattaggaatttaattggattttattggtatagtataaagtcattattcgatatacacaagcactttattgaaaaatatagaaaataagtatatttaatgcttttatgtgtctgatgtcgcttacgtatttcatcttatttttcgtactcatgcatctttttgatgaataatagtttgtagtagttctatataaccaagacctgacactcaaaatttcaaatcaagaaaaagaacgacatgagaactctcatgtcgttcatctcaaaatttatatctcatcatgtaatgttcacgccgccacttgcatacccgacaaccgtattcacaagtgtgagtccggctgccgttgccgagaacaccagcagcagacgtgtctgtgcagtcacaggtatagttaatccggttgttatgccattggagatactacccaatgcaataataccggtgagtggaggtgccagtgtaacgaccgcccccggaaccgcagtaaatgcattatcaggagtaggtgaactgaataattgcgcagtgatggttaccgttgaaccaaccaaggccaaggctgctgtggtactgaaataggcagcaatcgaagttataacgccatcccgtgggacagagaacgcaaagttaatgagtggtccgacaattgttcccgttaaatcaatcgtgccacccaaaatgctgactcctgttgccgagctgccgaaaccgataaggcttgtcgttccgaccagtccaccaagaatcgttgttaatatggcaggcccgccagaagcaaacggtatgatggcgccagaacccgtagccccagtaacaccggtgctgccagttactcccgcaatcccagttgcgccggtagccccggttacccctgcaattcccgctgcacccgtatctcctgtcacacccgttgccccggtagccccggtgactcccgcaagtccagctgcacccgtattccctgtgactccggtggctcctgctacgccaggatcacctgttgctcctgtaacgcccgctgccccaacagctcctgtactccccgttgcacctgtcgctcctgttgcgccacctgctgggcctgccgcacccgttgcgccagtaacacctgtcgcacctgctggtccctgggcaccagcagctcccggtgtaccagctggacctacaccaccctgagaaccagcagcgccagccgggccttgtgaaccaggtacgccctgaggacccgctggtcctgcaggtcctgcgggaccttgactccctatgtttctaagccctgttgtgatagccaattcggtcgcccggatcaaaatgaccagttgatctttctcagccgaatcgatattcccctgtaaaatgacagataggagcacatccagcaattgctgcaaattggttcccacactgatcggagaaaatggaacggcctctgcagatacaatggtaagctccaagatcgcttcgagatctgccttgattccctttttcaaatccgagcaatgaaccagagccagtaatttacgcagtacctcaatcagaagtgaaacattgtgaggcgtaggattggcaaaaacctgtacaattgctcctttcaactcaccaattaatttgagaaggaattcggcttctttgtcaaaacacttaggatggtggttattgtgatgatgattgtggtggttatgatggtgctcgtgatggtgttctttgtgctgctcttggggatggtcacagtcctcagcttttttttttttaaatccgctccaaccatatctgatgcgtttctttggtttcatctttttgcagatcctccttagtgagtctcaatcaatccattacaggcgaacatcactggtttgatgatatcagtatattagcaagcaagaatttcgtgattattatataagtaaatttccgaattaccgttttcagcttggagcagcctccattatcacggagaggattttgcatggaagtcagccctatgtatagcccaaccaaaagagcgctatccgatgagtacaatactcctggatgcgccctttttatatttacagtatttaatttatctttgttgattagtccaatttaattttgaaaacaataggcgcattacttttcacagttgtcgttgtgattgtcagtgcgtccgctgttctctcccatttcggttgttcctcgtaaccaagtacctgaatatcttgaatgaccccttgaaaatgatgagaattttccttcagggatttaatctgcaccaccccgttatctggataggcaagaaccgtggcatacagactgctttcttttaacgtaaaccgtatatcttcactcgtaaatatcttcgtatccccatccgtgaattgcccttccttcacctctgtcggaccctcgccaaacgtacgccagaatgacgtgtcatagatcgcttccccattcacttccagccacttgccaatgctcagcaaaatctcacgatcttcttccggtatgctgccgtctgctttgggtccaatgttcagcagtaaatttccgtttttgcttacaatatcgacgagatcccgaatgatctcttcagccgttttatagttattattttccgtataacaccatgagtttttagcaacagctgtatccgtttgccaaaaatagggcttaagctcagcgaactgtccccgctccacatccggaacggcactaccaaacatgtaggcctcatgtttataattgatagctacaggcacaccccattcttcgcctttgttataataataggcagcaaattttttaagatagggtttgaacgcaaccgtttgaatccaccaatcaaaataaaagacctttggctggtattgatcaaccagttcacagcagcgaatcaaccagtcctccagatactcctcggttggaggtgagtcatacaagtcgaagtgatccttgggttcaggcatggcaggccaatagaaatccccacgctccaggggttccttaatatctgaatcaaactccttcccgtgagacatgaagaaccagtgctcggcgcggtgagacgacacgcataaggtcagcccctgcttctcgtatgcaaccttcatctcacccagaagatcccgtttggggcccatttcatatgtgttatagtgagagatagagcttttatacatctgaaaaccatcatggtgctcagccacaggcataacatatctggctccagcctgtttgaataacgttgcccattcgtctgcatcgaacttctctgcacgaaacattggaatgaagtctttatatccaaagtccttatgaggtccatacaccttcaggtgatgttcgtaagctttggtcccttgtatgtacatatttcgcgaataccattcgctatcataggccggtacagaatatagcccccagtgaatgaatatgccgaatttcgcttttgggtaccattcaggaacttggaaggtgctaagcgaactccagttgtccttgaatttaccgctctcaatcgttgcttcaatatgttgcaaatattcgtttttgtccatgagatgttctcatcccttctgttattgtctttagttgtattgtagtgctacgaccgaaggatagacatgcagaacactaacttttagatggacaataataaccttgtatggagatgaaaagtatgaatcaccaaactttgcttacgaactacctgtccaatctccaagtcgaattatttatggtcaattacaatcggtgcgatacggattggcgggatctggattacacgcccgattacagcaagttttatttcatatgcgagggtgaaggttggctcaaaattggggatgaggagtattatcctgcgcctaatcagcttattttaatgccagaggggatcaaacagtcttactctgccattaatgaaagtccttttctcaaatattggtgtcactttagcgcgaaggttgggggaatcaatctgttccaaattctgaaattcccacacatctgtacgatagatcaacctgagttgattcaagcaatcttcagcagtatccttacatatgcaaaatccgatgaagtctatggccatatgatggccaagagcaaactaaccgagctactgtcccactatataatgaatctggatctggatcagatctcttttattaacgtgcctgtcatggagaaactgtccaccattctggcgtatattgattccaacatcgaagagaatatttcggttcaggatctggcccagatcgcctacatgcatccaaattatttcattcgattcttcaagcagcagatcggagttcctccgatcctctatattactggcaaaaaaatcgataaagccaaggagttgctggcctgcaccccgaacacaatcactgccatcgccgagcatctcggtttcagtgatttgtattatttctccagacagttcaaaaagcatacagggctcacgcccacggagtaccgcaaacaaaaaacggtactgacaacgtaagacgtaagccctgatgctcaggtatgtttacttattgggatgaattaaaatggacataacacttttgctttccatttgaaaacataacaactcttcatttcgtagcttggtctgcacattcgccgtttcttccccatcattgaagaggactacagctacggaaccatcggcatttttaaaagccacagaacaaattccatcatcactggatgttgattcgatccgaacagccttcgggcggatcacagcactgaaatgagccagagcataataatcaagtgtatacgtaagttcctttgtttgctgattcacctgtacgatcccacgacacgtactgcggccaaatcccggaacggttggcccgttgttctcatcaagtgccatattccaaagtacaaaggacttgctgtaattgcgaagaatctgaattcccgttcgcatcacattcgagaaggcttgctcaaatggcgggatccactctccacccgaaccttcagtgaaatgcacttctttacctgcaaaagcttcataaaccttcgtttgagcagaagcatcgcccccgtaccaatgccaggctacaccatccacttcctctcccgcttgttcaagtacggtcaggggatagtccggttgatcccagttgtgatcgtaacagagaattttggttgaaatatcgttgttaacaaaggctggtttgagattatttttgataaaatctgcttgggcctcggctggcatcaacataccaggatagtgccctggttcatagagggcctcattctgcggtgtaatggcatggatcggtaatccatgcttgccatacgcttgaatgtatttcacgaaatattcagcataaacgggataccattcaaccttcaactgtccggtaatcatcgatccactcgttttcatccagccgggtgcactccatggtgaagcaaacagcttcaattcaggattcaatgccaacgccttttgcgttaacggaataacgtccccttcatcatgtgcaatactaaattgggttaattccgggtccgtctgctgttcgggcatatcgttataactatataccgttctcgcataatccgaagcgcccatcggattacggatgactgagagcccaatccctttctccggatggaatagtcgggtcatgacctcatcccgttgctcctcattcaagatttggttgatcaaataggcagatgaatcggtaaaagaagcaccaaatccgtccatctcctgatacgttagctgatcatccagatggatggtcgttgtttccttatcagcatccagtggtttcaattgctcttgggatagagatacaaataaatcttcttcacccgtagatttgtacattttgaatgtcgtcataggattctcctttgtatttctattattgaatgcctagtttctctttgttcaatttcatcttttcactgcgtaccttcacaatctcttcccaacgattctcacctaaaaatgacttgtaagaagccagtgcattgtcatacgaggcatcatccttggaccgtaccatactgaccagcgttgtattccacttcgtattgattgctgacaacgcacgagcttcaggtgtaccttgatccgggctaatattctccagaataaagtgtggtttcagcttgcctttgccccactcctgcatctgtttaatcgcttcaggaaaagcatctgcactgagggctttgtggcggtcatgaccgaagaacataaactcacccattcgataatcctttttgaattgatctgcgttattcagttgcatgtctttcactgctggcagcaattctacactaccgtcggctttggtttggtaggtttccccttcgatcccgtaattcataagcgtctgtccttcttcactcagcaagtatgtgaatatctgaatggccttggccggatctttacagtccttggaaatgaaattgatcatccacccggttattccggattgattcaatgttggtgcattacctttggtgctctgcggtccatcgatagcaacatattctttgcctggattcgcactcatgtagatttgcaagtttcctccttgttgaggtgtaccgtcaagcagcatcgtcgcatatttaccggacttcactttttcttcaaaagcggttccatcatcggcaaaactgtcatcactgatattgccgtctctatacacggtgttcaatgttttcaaccacgtgaggtaatcttcatccagattgcgatcatagaattctcctgattcggtctccaacggaacaccgatgaaatcttgtaacgtatcccctagtgaacccgttccttctcctacggcattaaagccgaatggaatcagcgcagggaactcttgcttaattcgtttcatcacattctggaattcttctggcgttccaatgaccggactacccaaagcttcgtacacatctttacgaatgataaatgccgttttggcaggaatgttaccgctatcataatcctcttgtgtattggaatagttcgggtaaccataggttttaccatccgccaattggaaccagttcaatgtatcggcagccgcaactttattgaagtaaggatcatatttttccgccagatcgttcagcggcatcgcccaagttgcagctttttgtaccacaggagaattcgagtcaaatacggtcagcaagtcaggcatatctccacctgcgaaaaaggtgtttaacttggtatcatcacctgtgatgaatttaatattgatgttcagatcctctttgattttcttggtaacaatgtccttgccaaaatcagtgttccaccagtccgcattgacgtaccatgtcaggtcggtagcctcttcctttttatccaactgccaagccggcttttccgggtcgaccgtataacgatcttcaatggatacccagttcccttcactagagccacccgatccaccactgcaacctgtaatcataagtacggctgtgagcagtgttgcgagcaatctaatcccttttttgcctgatgtcttgttcaacttcaacatatttttgttcctcctcaaaatggggtattggttgctcctattccttgactgctccgagcatcattcccgagataaagtatctctgaacgatgggatagatcagcacgatagggagtgttgtaataacaatggtggctagctgcacgcctttggtcgttgtttcaatcacagccgaacccccgacattttgcatggactgtgtctgggactgcacgataatctcatacaacatcatctgaagtggatacagtgactgatcggtaatgtataacttggttgtcataaagtcgttccattgccccaccccattaaatagtgcaattgtagccatggcaggcatggagagtggaatgaagattttcaggaaaatatgccaatcccctgcaccgtcaatcttggccgattcttccagcgaatccggaacattccggaagaaattcatcagaatcacgacatcatagaagctgaacaacgccggaataatgtacacccagaagctgtttaacaatccaagtgatttgattaacaggtatgtcgggatcatgccgcccgagaagaacatggtaataacacccatggcaacgtataatttacggcctcttatgtactttttgctcagaccgtaaccaaccatggcacagaagaacacatgtgtaacaacgccaatcgttgttttggacaccgatatgaagaaggcctgccagatgccctgatcattgaatacagctctgtaattctccagtgagaattccggtgaccagaagatgaatccaccttccgccaacgctttgcctgagctaaaggaagagatgatgacattccagagcggaaccagaataacaatcgtacagatgattaacaaaatcatgtttaaggtatcaaagatccgactatcgagatcttcttttgccacctttccattcacgcgggatgcctccttctacaacacagattgattatcgtttaatttgcttgtgattttgtttgccgtgacgagcagaatgacagagatgatggagacacccaagccaacggccgttgcataggaaaagtcaccctgagacatccccatacggtagacgtacgaattgatgacttccgctttatcgcggttctgggagttcatgagaaccagggtctgatccaaatttgaccctaataaaccgcttacagttaaaatcagatttaggcttatgattgatttcatgttgggcaatgtgatattccagatctgtctaagacggcttgcaccatcaattttggcagcttcatagtatgttggatcaatctttgccatgatcgccagatacagaatcgttccccaacctgcttctttccaaatatccgataacgtagcaatccaccaatacttgcccgcatccagcaagatgttctgcggttgcgagatcactcccaggctaagtaacaactgattaaataaccccgttgtcgaaaaccaggtgatcagcattcccccaagtacgatccaggacaaaaagtgaggtaaatatgaaaccgtttgcacaaacttcttgaatcgtccgctgtttaactcgtagatcatgattgcgagaatgatcggaatgacaaacccgatacctaatttcaaaaaactgatccccagcgtattcacaactgcatcccagaagtatttatctgataaaatgattctgaaattatcgagccctacccaaggagcggtagcaagcgtatcaatgaccgtgtaatttttaaaggcaattgtcaaaccgtaaatcgggatgtaacagaaaataatcataaagataatgcctgggataatcatcgattgaatctcccattgtctccgataatcgactatgaattctttaatccgttgcccgaggggtttcttcccattgggactgatcgcatttttaccggttgaagtctctacggctaatttatccacgtttttttactcccctccatcatgcatacatgtttataaaaacgtttttatttttggacataaaaaacccctttgtttttatttatgtaaaaaaagaccggagaagaagctcaatcaacttatgtacggtaatctttccggtcgatcttcacatggcttgaacctctcaccaccagctcacccgccaatttttgcgcggccccttgttctttctccttaatcatacccaccagttgattgattgccaggatgccctgtcttgcaatttgatttcttaccgttgtgagcggtggagaaaaatactgtgcgatatcaatatcgtcaaaacccacgacacttacatcttgaggcacttcaaaaccctcagacttcaacgcatgcatacagccaatagcactcaagtcattccctgcaagaaaagcatcaggccgcttgccggggtgcaaatgaagaaaagattttatcgcactatacgtgctctcctcctcaaaatacccttgtataatgtaatcttcatcgattggaagctggtactcccgcaaagcagccagatagccatccctacgctgtacactgtcaaacatcgtgtccacacccgaaatataagcaattttcttgtgccccagcccaattaaatacttggttgcttcgtaagccgccacgtacgagtcaaaaatgacacttcccatcgtatcactctgatagacccgatccagaaaaacagccttgatcttatctttctccatggcgataatatcttgctcatcaatccgaagctcttcgtagataatgacaccatccacccgccgacccagaatattactcataataacgtgtttatccttggtcacaaatacattcaaaccatacccaagacgatcacattcgcgagacatcgactcaaccagcttgtagaaatacggacccgatacacttgtagtgaaaaaaccaagcattttggtttgaccggacttcaacagcttgccattcagattgggcacataatttaaacgctctgccaccttaagaacatgtgattttgtctccgggttcaagacatccacaccattcaaggcgttggagacagtagatatggatacgcccgcttcccttgctacatctttaatcgttatctttgccataagttttgttcctttgctataaaaacgtttttataatgtttaaattatcataaaaccgttttcatggcaacactttaatttgtgagttcaggcattatgtactttattcatagctatataccgctgcgggcgcaaaaaaacggctcatgtatgagccgccgttcatgaaggtttagctttctattcctcatcctgtttatacatggagtaaatctgttgcagctgctcttccagacgttccaagcgaacaaaacgatccgctcgaatatattccttctgttccacaagcatgatcattgttggaacggtaaaaataagaaacttggaagcaacttcttccacgtcgttagcattaatgtgacccaggtatattgatgaataagattccagcaacgccctgatcttggggagtaaagcgtgacatacactgcactctggacgagatacatacaaaaaaaccaattcatgttgttgaataacttcttcaaccatttctatggaggttaactcatgaatatctttcatagcaactcaaccctttcagtcattcaatagcttgctcatttaaactttttcttttcaagtatagcctatatgcgttagaatcaaatggaatatatccccatatgaaagaggttagggtatgaaaaaatcattcttatttctgttcactgctctggtagttgttacttccttctcagcatatgcacctgtgtcgaatgcctctggcgatattggagtcagcttattgtccgatcgtcagcaaggtacagtaaagtagaacttgtacagaaagtaacaggcgacaattcggataacatctgaattagtcgcctgctttcatttagtcatattgatttttatttccaatctctctttcgaagataagattcgaatacaaaagtaccaaacggcagtagaccggcgagtccacccattaaccagcgtgttatcttccactttttgaccagagccaaatgcactagggctataaggtacaaaggaaacaaaataccatgaatcatgcccattaaggctacagcggaagagatatctgcaaaatatttcagaggcatagcaataaaaatcaataaaagtaaggatacgccctcccatatgcccgcaattctgaatcggcctgtcactgttttcataaagtccattctcacctttcctgctaatcatttgtgaaatatgtaacttgtaacatgatacaaaaacctcacgccacatctccctacaaatatgtcgttctgaagctcatatttagtataacgtatgactccgatttgaagatgcttcaaatttgaataattattgaatccataaaatcagattcccacatcaggtcttatggattcaagttgtctcacgctcaatcagctggtatgtcagctgctctgtcttcaactctgttttacccaatacagcccacaagtgatggaaagcctgggtggcttgctccgcaatcggattgtgtatggtcgtgatcccgaggacacgggaaagctcgatatcatcaaaccccacaatggcgagttgttccggtacctgaatattccgtctgcgtgcttcactaagaatgccgatggctgcataatcatttgaacataatacggcttgtggaatttctggcccctcagccattcttcgcattgcttcttcgccatcggaggagctaaatacggaatattgatatgcttcagtccacacatgcaaccctctgctcttcatgaaagattcataggcttcacggcggctctgggtattcagactttcagccctgccaaatgcatttgcaattcgggtgtatcctctcgaaaccagatgctccagagctaacttatacccctctgcctgatccatagcaacagacggaatctcgtcattccccattcgctgccaggagacaatgggcccatactccatataagcttttaatttccgaggatcattaacacaagcaataataactagcccatcgactcgtttactgcgcagatcttcgaaagcctgcaattcaatctccggatctccacgggatgtatagataatcgtctgaaacccaaaatccatggctgtatcaatgaattgattcatgaatgtaagaatgatctcacctgtggtagaggtcacaattccaatctgctttgtctgccctgtagataacgatatcgcattccggttgggaatataattcaactgtttcataatatccgttatgatctgtcttgcttcatcactaacatgcggagaatggttaatcactcgtgacactgtcgcttttgagtaacctgatcgcttcataatttcatcaaacttggacatcggagactcccttcttgctaacgaactatagaataatagtatgcctcagatctgggtcaaaagtaaaacttgacgtgtaacccgttacaacgtttaagctttttttatgtcatacatgaatcatcttaatatcaatttgatgaatggagcgatacacatgagtaatcatacttatcaattcccggaaaatttcctgtggggtggcgcaattgcagccaatcaggctgaaggtgcatacaatcaaggcggcaaaggattatctactcaggatgtagctcccaaaggcatcatgggtccaatcacggaagaaccaaccgaagataacatgaaactgatcggtatagatctgtatcatcgctacaaggaagatgtgaaactgtttgccgagatgggcttcaaggtattccgtacttccatcgcctggtcccggattttcccaaaaggggacgagctggaaccaaatgaagaaggtctgcaattctacgacgatctgtttgacgagtgtcacaaatacgggatcgaaccactggttacgctgtcccactatgagacacctcttcacttgtccaaagaatacgacggctgggttaaccggaaaatggttggattctatgagcgttatgtaactgccgtatttaaacgttataaaaacaaagtaaaatactggcttacttttaacgaaatcaattcgattcttgaagcacccttcatgagcggtggtatctacactcctaaggaaaagcttagcaagcaagatctctatcaagcaatccatcatgagtttgtagccagcgcttccgctgtgaagttatgtcatgagatcattcctacagcacagattggttgtatgatgctcagtatgcctacctacccgctgacaccgaatccagacgatatgatcaaagtcatggaattcgagcatagcaactatttcttcggtgatgtacacgtaagaggtcgctaccctggttatatgaaacgttacttccgtgaaaatggaatcgagattaagacggaagctggcgacgaggaaatgttactgaatacagtagactttatctctttcagttattacatgagtatctgtcagacagcagacccggagaaacaaatcgcaggtgaaggtaaccttcttgggggtgtacctaacccttatctgccagcaagtgaatggggatggcagattgacccgcaaggattgcgttatgtgcttaacatgttctatgaccgatatcaaaaaccactgtttattgtagaaaatggtcttggtgctgttgatgaattgatcacgggtgcggacggagagaaaacagttgaagatgactaccgcatccagtatctgaatgatcatctggttcaggttggcgaagccattgaagatggcgttgaaattatgggttatacatcatggggttgcattgatgttgtcagtgcgtcttctgcccagttgaaaaaacgttatggctatatctatgtggatcgtcatgacgatggatcaggaacactcgaacgttatcgcaagaaatccttccattggtacaaagaagtgatcagcagtaacgggaaaagtttgcagcgttaaggatctttaagcaaatgtaacagatacattcttctatccctcggacatatcacataaaaaagtgtcggttatacgataccttggcatgttttctgtctgggggattttatttttattttcaaaaagaaacacccgatgatacacatcgggcattttcattagctactatcacgttgtttactatttattcttcactagatgttcttcactacatctctactgtactttgttttgtcttcttctgttatcttgcgaatgaccctgcaaggattacccgcagcaatcacaccagacggtatactcttggtcactacgctccctgcaccgatgatcgtattatctccaatcgtcacaccggcaagaactgtcacaccgccaccgatccacacattattgcccaccgtgatgggtccaacgatctccagaccttcattgcgctgctcaacatcataagggtgacctgctgtataaaatccgcaattgggagcaacaaaaacgttatctccaaaactgattttgcctccatccagcatgacaatattatgattgctatagaagttctcaccaatttcaatattatagccgtaatcacatacaaatggctgttcaatcaggaaacgatccgtcgttttccccagcagtttcttgattaacgcttctctttcattgatcttggctggatgaagctggttataatcgtaacaaagtcctttggcatgtaaacgctcttcaattaactcttgatcataattggcgttatacaagagccctaattgagatttctctttttcagtcatcatttcgtaagcacttcccatcttctatctaaaataagttaaagctcaatctctctaataattctagcaggattaccgcccacaatcatattatccggaacatcctttgtaaccacagacccggaagcaatgaccacattatctccaatggtaacccccggattaataacggctctgccaccaatccatacattattgccaatcgtgactggcttgccatattctgcacccgtattgcgctcatgcggatggagtggatgagtagccgtatagatatgtacatctggtcccattaagcaatggtctccaatacgcacttcacacacatctaatatcgtacagttaaaattgctataaaaatgattgcctacatgaatgttatatccataatccacatgaatattaggttccatgcccaggtgttcacctgtagatcccaacagttctttcaataacttggtgcgaagctcaccgtccgtttccgtcgtttgattgaacgtccgcgtcattttccttgcatactctctgtcctcagacaattgaagatccgaagccatgtacagctcgccatccagcattttttgtttttccgtcttcgtagtcatgatcaccgctccctaaatacacatcatgtaattaaacattaagtaatacttttaaaaactcttttaattatatagattagtatgaataaagcaagttttgctcgatatgaaaatggttaatttcactgacgcataccctagcgtatcaacaataaaaaaacctctacacccattagactatgggaatgcagaggttcaagcttttgtccaatttctttattctaagcaaccgcctgaacggttttttccttaacgctaatggcatagatggcagacaccaaaccaagcagtatcagaacagaaccaacccatccagtatttagaatcgatgagtgatcgatcaccatgccgccgatataggtacccagtgcaatacctgcatgggcaatacctgagttggtgctgattagcgtttcggctgtttccggcgaagttttgataatgagactattctgcacaggcgtaacggtccagctcagtgcactccagatgcttaacaacagtaagaaggcgatcaaaggcaatcccacactgaacggaatgacagccatactcacgataaagggaatcagcacaatgataatggctttagcaggatgcagacgatcggataacatgccaccgatgcctccacctgcaacagcggcgattccaaacatcatatagataaaggtgaccatcgtcgcactggcacccagcgtttcttgcaagaatggcgtgaaatacgcatataaagtcaaatgacccgcaagcacaagcaaagttgtagcatggattgccaacatttttggattccacagagccgtaagctgtttcttcagggatacagcaggaataggctgcacacgatccatcgcaatccagatggccaccataaccactgctgtgagaatagcgatcaacataaacacctcacgccagcctgccaagttacctacaaagattccaagaggtacacccaggataagtgatgcactacctcccatggtaatgatgccgacggcgcgtcctttatactgtggttccacaatgcgagctgcaagggtcagggagagcacaaaaataagtgagcccgtggcggctccgagcgctctgcccgccatcagcatataaaaactggaactaaatgcagagatcagattactgatcagaaaaacaaacagcgtacacatatatacctttttacgctcgaatctggccgtcatatttaataaaatcggtgcagacaacgcatagacaagtgagaaaatagagattaaataccccgctttggccagggaaagatgaagatccgtagcaatcaggtccagaattccgcccaaaatcagttcaacggttccgaccacaaatgctgcgatagcaagcacatatactttcttattcatttttgaatcctcctcaaaaagttacaactacgatagtaacccataagaatgaaagtttcaacagttattttcatgattgttttcaaacaaagatataacaaaaaaactatcctccaagagaatagttttaatagattaatctggtgagcagtttctcgatttcagcatcctgtaacagttggtcaccgtatttttttgtaatctgagtaagggcaacatcatggtagaaataatcagtcatcgctttaacaatcggtttggacatcgtcttgatcgctcgccatgaatcgtgctccacaccggcaaacagcaaatacgcatgatccacaataagcagctgtgaaggttctggcgcatcaagcaatggaatcaacgagtatatccggtttaaggatgtctccattcccccaacggcaagcacttcaacgtacacgccctgcttttccttctgctccagcagttcacgatatttctccattcgctcattccaggccagaaaaagaatcgatgaatctgcttcctcgataagctgttcgatattcgatgcgatggacgactcatcttttaacgtccagatatgctcatctgtaaatgtacgtttgattttgtaactcttcaattcctcaatatctttctcaaaatcagccttgatcttatgaataatagactgaagatccacagccatatatagttttttcttcccatccatcgttgtcagcaccgttcccttgtcgatcaggcgattgagcacttcatagattttggctttgggaacgttggagtaatttacaatcgatgtggcatcaagcggttcatcctgggcaaatatagcctcgtatacctgactttcatattgtgtaaacccgaatttctgcaacatggtttggatcggcgcatcccttcttagtgtgtctggtctatctagtttagacgcatgaacttcccatgtccagtttatcccatgtggctatgtccgatcccaaaagcgctgctgggtcatcgcttgaatgaattgctctgcaaacgccgtaggctgctgttccacaatgacgccaggtttgcctataatgccgacaggctggatcaatgctgcccccgtcggtgttgcgccgatcggtttgaaatgattgtacgtttcgatggcataggatcgggtgtatttttgaacataatcgttttcctgctctcctccaacaatgaacagaccatcatataccaagggtgaaccggttaaaaagctgtcgtccaccctgagctctacaccccccgttccacgcaccacaccctgtctttcatgtacaataaccggttgaagtcccgctcccttaagctcttccaaaatgtattgtgtgctcgggccatcgaatccttccccaacaatcactccgacacgcaatgtcttgggagaaaacaccgtatttgccatgctgagcgcaggtgacgacttcgtcactggagattcagggacgttaggtacattgactccgagttccacggccagaatggtcgccagctccgtgctgatatgacctaacatattgacaacctgctgacgaatggaaccatcctttaccttcccaagttcaaacgtgagtgcttgaataatatggcttctctccaagcctgacatgctgttccagaagagacgtgcttgcgagaaatgatccaggaagctgggtgccgttttccgttctttaagaccttgcactggggaaggatatgtcacaaatcccccttttgttcccggcacagtataaggtgagttattggcaagcgaattgtcatgataggcgactctcccctgatcaatggtatagcgagaggctccatctctctggttgttatgtacagggcatatcggacgattgatcggcagttcctgataattcgtgccaaccctcgccaattgagtatccgtgtaagaaaacagtcgcccttgaagcaacggatcattgctaaaatcaataccacgtacgatgttccctggatggaaagcaacttgttccgtttcagcaaatacattttcgacattgcggttaatcgtcattttgccaatgattcgcaccggaatgtcttcttcaggccataatttcgttgcatccaaaatatcaaaatcaaacttgaattcatccgcttcctccaaaacttgtattccgagttcaaactcggcaaaattgcccgcattgatgttctcccacagatccctgcgatgaaagtccggatccgcacctcccagcttttgagcttcatcccacacaaaagaatgcatgccaagtacgggcctccaatgaaatttcacgaatctggatttaccttctttgttcaccagtcggaaggtatgtactccaaatccctgcatcattcgaaaacttcgcggtatcgtgcgatccgacataatccacatgaccatagcagccgactcctggttattcgcaatgaaatcccagaaggtgtcgtgtgcagtagagccctgtggaatttcattgttaggttccggctttaccgcatgaatcaaatccgggaacttaactccgtcctgaatgaaaaaaacaggtatattgttgccaaccaagtcaaaattgccttcctcagtataaaacttcacggcgaacccacgtacatcccgattcgtctcgttaacccctttggaaccggcaacttcggaaaaacgcacaaacagcggtgttttcactcctggattctgaagaaaatgagccatcgttaactcttcaagtgatttatataactcaaattcaccgtaagctccatatccgcgggcatgcacaactctctccgggatgcgttcccggtcaaagtgagacagtttctcacgcatcagaaaatcttcaagtagcgtgggtccgcgatcccccgcttttagcgagttgctgtcatctgatattttaaccccttcgttggaagacatctctttcccgttattgtcccgaagaaaggtatttctttgctcaatctttttattctcatccataggttccttgctcatcccaatcacctccagaatatatgtatgggattgaaaatgcatttatgagtatctgttatacctatgaattgttgtgaattccacaggcactagatataaatggaaggtgttaaccccatttattgctcatgacgtcttttgtctagcaccttctacatcacattgtcatttactataaagaatctaatagaaaagagatgattagtatggctcgtgtcaatgctgttccgcaaccggatctggtattaatctattggtcaagaaatccgctcgtccctggttctgcgcgcagaatccaaagtgtacgtgtgattggtaatacgtctccatgtacattcacactggttcccggtgcacggctaatcaatgcactgaactgtttgctggacaatgatattggattcaaagtggtctaccgccataaaacgtcagcaatcagtggcgttctgttattaaaacgcaaataatcagaccccaaaaaaatggtgcctctccttatgggagcgcaccatttttcatttttttgaattaaacagtttagtctctatctttatacaatctagcgatttgttgcccaccttaaaccgttcaacagcatatccaaaaaaagaaacgaattagttgcaattctattcttaagacattagaatgaactcttttggagatatacatagacgtagacatgttggaccaaggtttgctatctaggtcatgaaaccttacaatcctgtgtacgtaatgtaatatttacctattaagatgtaggaaaaaccattatttattttgataacaatgagggatattatgaaaaaacagtttatggtacttggtcttggacgattcggttcaagcttgacacacacactcattaaaaatggacatgaagtgctcgctgtagacaagagtgaagctcttgttcaggaaatttcaacaatagctacccatgccgttcaggcagactgtactgacaaatcagtccttattgaacttggggcaagcaacttctctcacgccattgtcgcgatcggtgaagatctgcaagcaagtatactgaccactctgttattgaaagaacttaatgtgcccaaagtaacagccaaggctaaaaatgacaaccacggcagtgtgcttagcaagattggtgctgatcaaattgtttacccggaacgtgatatggctacgaggctggggaatcagcttagctcagacaacattattgattccattgaattgtcttcagattataatctggtcgagatcaaagctccccaaagtatgagtcagaagacacttctggaactcaacattcgagctgaatatggatgtaccgttatcgccatcaaaacggggaataacttaaatatctcacccatggcagaagacatagtccgtgcgggagatatgctcctgttaataggcagtaacgatgacattcggaatctggagagtgattatgaaccaaagaaataaacgtgtaatgaaaacttcggccctaacgaacattgaatcaattgtgaacaagttgaaaaataatatgagccctcctcaacttatcatgatcatcttcttcgctctcatctggattggggccttattgcttgcactgccgctatcttctagtaccgggacatccattggtttacttgatgccttgttcacagcaacctctgctatatgtgtaaacgggctgattgttctggatacagggacagtcttttctacatttggacagatcatcatcatggttttgattcaggttggcgggttggggttcatgacactaggtgtaatggtagccattattctggggaaacggattggcttgaaacagaggctccttattcaacaagccaccaatacatcctctgctcaaggtctggttaagctatccatgtatatagtgctaatagcctttgcttttgaagctctggctacagtggttcttacactgcgctggcagagcgatttaggatggggacaagctttatattattccatgttccattccatctctgccttcaataatgcgggtttctctctttggagtgatagccttactccatttgttggcgacccggtcgttaatctcacggtcattacgctctttgtcattggtggcttgggttacattgtggttgtggatatattccgcaaacgttcatggagaaagctctccttgcattcaaagatagtattaatcggcagtttttctctatacttgttcggattcatcaccatcttcctaatcgagagttggaatcctgctacgttcgctgatttatctttcggtgaacgcatatgggcttctctatttcagggtactgctcctcgaagctccggattcaataccattgacattggaagtatgttggctacatctcaatttttcattattatcctaatgttcattggggcttcttctggcggaacaggcggaggaattaaaatcaatacttttgtggttcttgttcttgcaaccattcagacatttcggggtggtgggcaaattcatgcttttgagcgtaaaattgcggaagaaacagtgatgcgcgcacttgctgttgtcttaagtgcccttgcctttgtacttggaatctccattttgttatccatatccgagggcattcttgaaaatcattttctggatgttctgtttgaagccacttcggcttttagcaccacaggactatcaatgggtctgacaagtgagttgagtgttgccggtaaaattatagtctctattacgatgtttgcaggacgattgggaccattaactctggcttttgcattggcacagaagaaacgcacatccaaaatcggttatgcagaggatcatgtcctcattggttaacatacgactgagaacatgttaatcctaatgcggaacaatgatttctttttatttcccaaccaagtttcctagcaaaacgcccccttaagcaaacgacagttgtctgcttaaaggggcattatttatatatttttctttacagaagattcataataagtacatttaccgaatgagcaggcaaacatacaatcgctgattcaccattcagcttgatctcctgttcttggggaaccactttctcatcattcttctgattcacattcggaatatgcaccaaatgatcttttccagtaagtgtgatcagtctggctgaagcattaaccttcagatcctgaaggcaaatccgggttgatttatctacaccatctgcattcaccagtttcacatacacatgccctgcgtccttcgtaacagagtggaatacttcccggttgtaagcttccagcttgtaatccagaaccttgctggtattacgtccgtctgtataggagcaaaccagattttttcctgtatctccaccatagttaaccgtgattgtataatgggttccattctcgagtggttcatagttggccgctctcaggttacctgctgccgagctggatgaatagtctcccagtgtataaccctcaatcccttgtttgtacaccttcacgcctgttgcgttcccgccgtaactaattgcgtactcaatgacatccttgttctcaggcgagatatccgtcagtcccacaccgatgtaaaaaccatcctcacctgaaattctttcagcctcaacgtgaactttgtaattggtccattcgtcattcagcagatacaatccattcaatccacttgattgtgccttcaaaatgagtccttttcctgcggttaacgcatatccttccgatccgggaatctgtctccatgcctcactaggctctgtacgttccctgaaatcttcatcaaacatcaaactgccatccacattggacgtcactgtaactcgtttcaccacgatgtctgcatgacccgttgcaatctcgatgccgccacgcggaatgagattcagcggttttcctttgctataggtggagaatgaagtctcaagcacctgatcccctacatattttgcaaaaagctgctgtacataataattcggtgtataccacacggtttcatcatcaaaccagatgcagtctggcgtccaacggtaagtaccgtccgttagtactttgttgaacaatggcgcataggcagccaaacgaacaacgtctgcattattttcaaatccagtcatgatcgcagcttctgcgaccgctcctgccagcgtgtttttgtccgtggaagcatattctccaacaaatactttggatgtttctttccaatcgatacttccgtcttcaaggtaagcccggtcataatagttgtatcgatctacgttgttcagcaaatattcattggagcggtagtagtgctcatctgcgatggtgtccatgtaattgtcctgattctcataccaggttacggtctcctcaatcacctcagcaccatctgcaaaagcaacctgagctgacccggtgaggtacccactaaggaacttccatccttcctggtacgcatcatcatccgcctgagcaccaaccgtcgagataatgtgcagctcatgatcaggatagttctgtttcatgtactcatctattgaatgtttgaatacttcgaagttggcaaaaaattcagtgccccagttctcattacctacacccagataacgaagatcaaacggttcaggatggcccatctggcttcgtacagccgcccattcgttgtgttcaaagtctgtactgagcgcaaagtcaatcagatctgtaaagttgcggatataataatcccttaaagcgccacccgcagggtgagcataatccgagcgtgcctgacacaacacaccgcaagccatgactggaaccggagcggcattcagatcttccgccagttggaagtactccatataaccgaggcccatcgtcatcatgtaaccccagacattgtaattttctttgcggagctcaaccggacccacagaatccttccagtcatatacgttatcccagataaaagatccctccgagatacatcctcccggaaaacgcaggaacttcggatgcagatctgcgagtgcctggattagatcttttctcaatcgatagttcgggttacctgtgtagttagcatgtgccgtagccgatattccctcttctgtcggatcagctccccatacattctgagggactagggacaccatatcgatggagatgtcacctgcaaacgtaagtgccagttgaccaagtacagtctccgttccgatcagagacaaaccgtatttcttccatgtgttcccgccttcaacatgcagcgttaccgaatcactgatggaagtgtcacttccatcctgcaattgaacagtgatcgttcctgccaattctgcttttgcccatacggtaaagtcatatgattcaccctgcttgatggacatggcacaatgctggttggagtctgagaatccacgattccgaatcgtagccccatcctgaaccgttacataataagcatttacttcagggtcttccacgttacagtgaacgtttagtccatccgtatgctgtacgcgcattttctcggtgtcgcctgaccaggcaaacaaaggttcacgatttcgtcctgtcgaacagccacattctccagagtcatgcgagtatgtatcaaatgcaaaagactcaaatgatcgattctgaacaagctctgcatagattccgccatctgccgcgttgttaatatcctcatagaaaagcccatacatgacttcactgatgtcagccaccttctgatctccatggatggtgaccgtataaggcggaagatgggctggcacaacagacacgtcaaagctttggctcagcttacgatcacctctgttcagaagcgcacggagcgtaacctcttgtgctgatgtgatcacctgaacctctccgttctcagacagaacttctggagcactggagctccattcaacagacactttaccacccagcaagtctgcgggtaatgatacatccttggtgatgattcggttggggaaggacaagtacttgtccgccgcaagcttcacaatcgcttcatctgtcagtgattcacacatcacttcaatgacttcatccatggtgagtgctgccccatagatccgaaagtcggataacgaacctgcaaaatccacatccgctgcatactgggaacgtgcaatataattctggctataattctcaggatcggtgaacgtatcaaaccattcgcgcaatttggcataattgccactggatgtctgactgatcgagccgtctgcggccttctccccattcacatatacaatcggacccgcactgctcaacgttcccccttggctgcctgctacggagagtgcgatatgcaaccattctccgcttgcaactcctccacttgggtggacaaccagattatcgccggcatataacgtacccagaagctgacgtgtcagaaataaatacggacccttctcccctttgccaaagtcaaaaatgcgttcccacacattagaccccttaccaagaaacacccaagtggcaatagtaactcctgtgttatcgcttacatcacgaagcagattcgagggtaattgcaaataagaagttccattcgctcccccgttgaaagtcaccgccgttctgcctttcaactcggatatcacaggcgggatctcgcctttggctataccatcatggcccttaccggagctgtccttcccgatctgaacgttatcttcaaacctgtattgtgcgattagttgattttgatatgtgctcatgttcttacctcctatgtagttgggaattgtcggttcacgctttttattcgtattaatataaaatgattgataaatagttaaacacatttcttaaacgtaataatatcgcatcaccgatccccatttcaatcctaaatttgagaaagacaactggtttatttgaatgtaatgacctttatcggctcttcccgtctcttatttatatttaattttactcttataaacattacatttatggtttacaaacatataaatcaattgataatataacaaatgaaagcgcttgatataatgaaatgctcaaaggaggtctgccgaaccttttatcgtgtgttgccaagtatcggttgatttttcattccgggaaataggaaaggggaaacgtatgaaacgttattgggttcgcgtacttaacatttctgtactaagcaccactttacttactgcaacaactttggcaccggtctcggtgttcgcaaatggttcaggggaaaccgtgggtaactcgcagagttccaccacacctatcgctaatcctgctccaacatttaaaaatgtttccgttcatgacccttctgtcattaaggtggatgatacgttttatatttttggttcgcacctgcaagtagctaagtccaaagactttctgaactgggatctggtcgcctccggcgttacagataacaatcctgttgtccccaatgtaacccaggaattcgctgaagcgttggagtgggcgcagacggatacgttatgggcagcagatgtcattcaattggcggacggcaaattttatatgtattacaatgcttgtaaaggggactctccgcgatcagcgctcggcattgccgtcgcagacaatatcgaaggcccttataaggatcaaggcattctgttgaaatccggcatgtgggatcagatcagtgaggatggtaccatttacgatgcaacgattcatcccaatgtggttgatccggatgtcttttatgataaaaacggcaagttatggatggtgtatggctcgtattccggagggattttcattctggagatggatgcaacgacaggtaaaccgctgccaaatcaaggttatggcaagaagctgaccgggggcaatcatagtcgtattgaagcaccttatatgctctatagtcccgaaaccgattattattatctgtacctgtcttacggtggactaggtgctgatggaggatacaacattcgtgttgctcgctcccaaacaccggatgggcctttcctcgatgcggaaggaaacgatatgatcaacgttaaagcggataaggataaaccattgtttgatgatcgttctattgagccttttggagtcaaattaatggggaacttcctgttcgagagacagatcggtgatccgggcacaggcctaggtagcggctatgtatcgccagggcataactctgcttatgttgatccggagactggcaaacaatttctcatcttccatacccgctttccagggcgtggcgaagagcatgaagttcgcgtacacgagatgcatatgaatgcagatggttggcccgttgtttctccgtatcgctatgcggccttgggagaagatacaacgcaactgacaactcaggagattgctggtcagtaccaatgggtgaatcatggtaaggacatcacggcggacatcaagccatcccagaccgttcagttcacggcagatgggcagattcatggtgccgtgacaggaacatggagtcttggtgcagacaacaaggttcagatcacttcgaataacgttgtgtacaaaggcgttttcacacatgaatggaattcggaatctcaaagtacgcttctgacctttagcgcgctctcatcctccggaatttccatctggggaagtcaaagtgttgaacggagtgatcaggacattgtagatgcggtgaaaaaggacctgagcattagcaatacggatcacgtgttcttcaatctgtctctgcctaccaagggaacaagtgatgcagacattacgtggaaaagctccaacacttcggctctatcctctacaggtgtagtgcagcgaccacgcgctggtaagggtgatgccaaagtgaaattaaccgcaacgattcgtaaaggaactgcggtaaactccaaaacgtttaacgttatcattccacagcaagcggtaagcccgttgctcggggagtatacttttgaacacaaaaaacttgccaaagtcgcacaggattccagtaaaaatggatatcacggacaagcctttaacgtggtcagttctgctgcaagtggcaaaaatcaggctgctacattcaatggggtagacagttacattcagttacctggactcattacagatacaacggatttcacgtttagcgcctgggtcaattgggacggtggcgggtcctggcagcgtattttcgactttggaaatggcttgactagacatatgttccttactccctcccaacataatggggcattacaatttaccattcataatgagggacgggatcagagcctgattgcagcaaaaccactgccttccaaagagtgggttcatgtcgctgtaacccttcagggtgatgtgggtactctgtatgtgaatggtacatcggttgcaagcagctctgagattacttttaacccaaaagatctgcatgtaacggaagcttatgtaggcaagagtcgttatacgtctgatccgttctataaaggcagcctggataatgtaaaagtgtatgataaagcattaacagccaaggaaatacagcgtcaggccaaagaaaaaccataagttagagtccccttcgctagaggttgggggctccatagtgcacacatcaataaagcagccaatgttttgaactgaaccctttgtgagacacgactaacgagggagttgcagttcattacatcaggttgctttattgtcattcctttcatgtatgcatttattcgttcatcgttcgttacattcacagatggatctttgcatctcacttcgaataatgaatgaccatgttgaatttgttcgtcttagcaccggagttaacgtaggcgtgaggcttgtccgctccaaaacggatcgactcccctgaactcaccgtataatcttccgcccctactctaatcgtaacttcaccttcaaagaccgtaataaactcttccgtaccttcgatatgcggttcagctttcaactcagacttggggtccatctccatcatatatatttcaaagcggcgtccttcttcaaaaggaaaatgcggataaatccgaacccttccctcatcctccatcaatacttgaatatcatcccccgttacaacggttgtatctgacttcggctcgtgaatcaaagcagtaaaggaagttttcaggccattagcaatcttccatacggttgcaatggatggattggattcaccacgttcaatctgaccaagcatggtcttgctaataccagacatttcggcgaccttgtccagactgagttttctttgttccctaagctgtttcaggttctgagcaagaatactattaatgtttttcaaaaatccatcctcctcatttcataattttgttgtgctatataacgtacatattgtacaatgataaagaccgtacgctataacgtacatttgaggtcattatatcacacaactaagaagacgtggaggaaccatgaacattatacctttagtgacctatgcaatcatcgcttcatttacacccggacccaacaacatcatttccatgacgcatgccagaaatcaggggttccgcaagacccttccgtttattagtggagttgcagccggctgcctgctaattatgtttctgtccagttatttcaaccttattcttcatcaatatattcccaggatcgcacccgtattgaacgtgttagggtgtgtgtatatgctctatctggctctcaaaatcatgcgaagtaaacctgcagattcgcaagaaaacaaggttaatcattattcatttctatttgggttcaccctgcaattcatcaatcccaaagtcattctgtatgggcttactgccatatccgtttttgttctgcctcttgggcagtcccatgttcatttaattgtattttccttgctgctcaccttcatcggtattagtgccaatatgacctgggcgttcggtggcatgttattccagagctttttattaagatacgagcgtcctgttaatatcgtcatgggtatgttgttaatttacagtgcactatcaatcctgatgtaaaatgtaatagaaaaagcgtccactcattcaatgagctgaacgcttttatttttttcatcctaattccggtctccaccatggatgtgtagggtaatgctccgtatgaagcacaaccttctcaccgattttgggagttgcaatcttaactttcaaagcatgtgcagccttcgtaatccgttcgactggttcattccaggcatgataggcaagcgtaaatgcggcccaatgaatcggaataagcaacttaccccctacatccaagtgtgcttgcactgtttcttccggcatcatgtgaatgttggaccaacgctcgtcatattgcccacactccatcaaggtcaggtcaaatggaccatatttactgccaatttccttgaaatgaggaccgtatccgctgtccccactaaagaacaccttcgtatgttgtccagcgataacccacgaacaccataaagtagaattacggtcgaataatcctctgccagagaaatgtcttgctggcgtgcaagcgaatgttaaacctttgaacgataactcatcccaccagttatgttcggtaatctgttccgaaggcacacccagttgaatcagacgacgacgtaccccaagcggtacgataaatcgctttgttttatccttcaatctacgaatggagtcataatccagatgatcataatggtcatgcgatataatgattgcatccagcgttgggaaatcctccggttgaatcggtagattggtgctgtaacgtttggtacccacccaggatacgggtgatggacgattgcccagcatcggatcaaagagcaatctgtgcccttctatttcgagtaaaaaagccgaatgtccgaaccatgtaacctgtggtttatcggatgcactgaaggtttcagcaggttcacatatctccataggcatcgtgccagatggcctcctctctacattgccacgcatggaatctctcaatatactgatcagggacttgaagttcatgcctgctgatgttggaagctgattttcgtattttgtcattatacataccttctgttctatataatcaatctaggttcaatatttggaagagaactattcatatcgtagctatatattaattcattggccgttgatatacaattttcactagtatacgcccattccccatgatcggaaataaactcaattaagatagaattaagactctgttttctctcctataagattgggcatatatgatagagaaaatacatggagagtatgtgagagaacatgaagaaatggcgcaaaagattagttaagtttttgatatttgacctggcgatagttctgttgcttctgggtactggcgtgatctaccaacaagtgggtttaaggcaggatgccaaaacactcgtcccccctggtaagctgtacgaagtccatggagacaatatgcatctatatactggtggagaaggcgatgtaacagtcgtactcgcctctggctgggggaccgctaatccctatgtagattattatccattatatgaaaagcttgctcccaacacaaaattcgctgtatatgaccgatttggctatggatatagcgatcagaccgataagaaacgtgatgtcgataccgtagctgaagaattacacgagttgttgcaggtatctggacagaagccaccttatgtattagttggacattcgctcggctcgctggaaaccatccgtttcgcacaaaaatacccggatctcgtcaagggtatcgtcatgattgatggcggaagccccgaatattattcgaatgacgatgactctttggcagacacaattggtggttttgcgaataaattccgtatccaaaccggactattccgcctctccatgcaatctgacatggttgtcgaaacttctaatgccaatcgtaatgaactgaaacttgtacccgatgatctgaaaaaattggatacaactgcgctgttgcacaactatggtaatgtgaacacgttggatgaattacgtgaaatagctgccaatgccaaagtggttgtagatcacaaacaaaccttaccgtttccactgaccatactgacggctgattaccttggtgcaagtgaacccgaatgggataaatcccaagtagaattcaaatcttggtcagatgattctaaacaggtaaccattaaagataccgatcattacatccatcaatatcgccctgatatcgttgcggatgagatattggccctggtaaagaagtaacgtacactctactaaagtaagactatgttatatcataaaagaaaccccaaagattctctaatatctttggggttttaagtatgagatttattgtgctatcgccagtcttggccgttgggacctgaaatcgctgaaagcttgttcgatctctaattcagtcaactggtgacgataaaagtactgtttcatcgcctccatttcggttcgatcgccattgtagatgttatcaattcttcgaatgacctggttatataagctctcacgtgtggagttcacaggctcacacaaccaaaagttcgttcttttcacatcacctgtcttggtccagagcagattctcataacggatgacatcccagtcccaatatccagcatgaatctgctgaagttccgtcgtaaacatatcgtatatcaagttgggaggaatgtgtccataggttacacggtactctttcagtttgaatgcttcaatccactctgtcagggtgtactcccctggtgaatacgcatacaatttaggtgcataagaattactctgcaatgccctaagtgcttcactttccatctccccatccaatcttgcacgtgaagcatataccttgagacaatagtcttgcaatctatatacaaccgagctattactaataagcgaagcctgtagagtgagatggccgtttttttcgtagtgcaacagcatcttttcaatgttattaccaatgggattgatgatgatcataatgaagtctccttgattaaaaataaaatataaaccgttttcgaattggttaaaaattgtactattacattctatattacccttttatattagtatgaacatatacaattttgccagaacatgaagtatttgctctgaaattcattctttgaaccgccatattcgggctacatttttactctaaaggctgtaacccgtttcacgtcaacaccaaaaaagtatagaataagtacgcaaaaaagcgatgcgtccttaaagttaagggacacatcgctcttatacaatatctaattattattgttagttaatggattaatgcataggaccttgttgtcctggcgttgatcctactttgacccgtttcacaaagagtgaagtaatcagaccgataatcgacagaactaatgcgaatacaaacgcattctgtacacctgacgtgaaacctgccagttgattttctggactttccgggttcgctactccgctcaaaaagcgggattgtcctgcgctcagtatacttaccgcaacagccgtaccgatcgctccggatacctgttgcaacgtattcatgatggcagtaccgtgaggataatactcacgtggcaattggttcagaccattcgtttgtgcaggcatcataatcatcgagattccgaccatcatgaacacatgcagcgtaatgatttttgccagtgttgttgtaggtgtaattccagtgtacatgaagagtacaaccgttacgacagccagaccaataatcacaagccacttcggaccgaacttgtcaaacagtcggcccatgaccggagacagtaaaccattcagcaaactacccggcaatagaaccagtccggcagttaacgctgtaacggccataccttgttgcagatacattggcaggatcagcatggatgacagcatcatcatcatacagatgaatatcaggatcaagccaatcgtaaacatcggatatttgaacgctcgcaaatccatcattggctgtttcattctcaactgacggatactgaataacagcaaggacaacacaccaataacgagagtggcaacaacgaccggactcgtccagcctccgccagtttctccatgtccccctgcactactgaagccgtatacgataccaccaaaaccaagggtagaaaggataatggacagtatgtcaattttgggcttggtcaatttcgaaatatttggcaagaacaacaagccgcataccagtgagatcaggaagaacggcaaggagatccagaaaatccaatgccagctcagattagccagaatcagaccggagatactcggaccgcttgctggtgcaaacatgataaccagaccaatcaatcccatggcagcaccacgtttttcaatcgggaaaataaccaatatggtgttaaacatcagtggcaacaatagcgctgtacctatcgcctgcagtacccgtgccaccaacagaatttcgaagctaggtgcaagtgcagcaacaaatgttcctgcaatcgagaaaatcaaagatgttgtaaacaactgtcttgtggtaaaccactgcaacagcataccggataccggtaccaggattcccaacacaagcaagtaacctgtagttaaccattgaatcgttgtaggacctacttccagtagagccataagtggcgtcaatgccacgtttaatgccgtttctccaaacagaccaataaagccgctcagcagcatcgcgaacaaaatcggaaataccttgtattgctttgtttcttgttgattctgtgcagaatcagccttcatggaaacctccacgatcccatcctcctcaaacgtatcgaactttctttttctctgtctcttggtataaattattgaatctgtttggcgttcttcgtcacaaccgacaaatactcagcagccgtcagcagaggctgtttatcctgattcgtcaggctgataatcagtgctccctccatcaaagaaatgatcagaagtgccgtctcccgcgccttctcttcaccaacgccatccagaatcagatgtttcttaatgacatcctgccaatctgcaaatacgccctgacatgcaatacgcaactgctgactaatacacgatgtctccacagctgcccagaagctgaatggcagaaatccggtaaacccggctgcttctgtttcatgagccaaatcatgaataaatctctgaatggcatcccccgtattgtcgtgggctgcaaatgttttctcaaatgtctgcaagatatgttcattggctttttgaatacactcgtgcgcgagctcttccttgccttgcgggaaataatgatacaacgaccctttcggcgtactactctctttgatgatctgattcagaccggtcgcatgatatccttgtgaaaaaaacagtctcgctgctgtgctgacaatagactctctagcattagacttttcactcaacgaaagccacttccttcaaataattataacaatcggtctatataattaaactcgttcagataaggactgtcaatcatttttatttcaaattttaatgtaaacgctaacagttcaggagtgagaaaatgaaccgagcgacggctcatggtcagatcatcataacagccgctaatttggagacaaagctccagattaagcggctgtttgttagcttgagtatattaaggactgtatattagtagatattggagtcatctccgtcttaatgtacctcctcatgcacagctttaggaggttcacttgttcgtttattacctgcccacacgtcttgcacgtagcgtccttcggcctgaagctgaatgagccagtctttcgcttgctgcatcgttgctccctgcaccttctgatatgcttgctgtaaagtctcttctaccgcaggggccatctggcttccatccccgcatacgtagagttttcctttgctcatcagcatgtgaatcaactgttcggaattctccttcatcagatgctgtacatacgttttgggcttgccatccgcacgagaaaaagcagtgtgtagtttaacgatcccttctcgctcgtattgttcaagctcttgacgatatatgaaatctgaatcattcctgcacccaaagaacagatgcgcttcacttagagacaaacctctctgtttcataacagctctcgcctggaggaaacctctgaatggtgctacccccgtgcctggtcccaccatgatcatcggaacatcagcctcttccgacagatgaaattcggattcagatgtacgtacaaacatgagaatatcttctccggatgaacaaccagcgaggtacgatgaagcaactccctggtattcgcctttgccactccatgcaggctctcttactaccgatacggttatgcttgcttgctcggaattcagacttggcgagctggatattgaataatatctgggcttaagcggaggcaatagttcaaggaacctttcgaaaggcaactcacacgcctcatacctttctagcaggtccaacatggtgattcgattggcaagaatatcatccctgtagctgttttcatccaacatgccttccagttcacgcttatgaggtggacatatcgtatgattagctaactcctgcaactgtgttctggagactggtgtctgcaattccacacaataagcgagcaactcatgaatcttgacgggtctgttcagtggtaggtgtgtaagatggctgacgtccgaagttaattggatcggagtatccccacgtagtccgaaccgactgagtatccgatccacattctgcttcggattgctaggcaacacgccgagatggtcgccttctctataattcatgccttcaggcagtaacacttcgatgtgacgtgtgcttcttccacttcccagcgcctgaagctctttattgactacaaccgtggcatagctggcatcataagttcgtgcaagaggcatatccgttttctcgcggacaaactccatttgaagtctgctggcgcttggcttcgaggatttgattgcttcctcgctaatccccaagacactcaacacctgaggccacaacatatgctgccacgtctcgacttgtttctccatgtcacctccggcatcggcttcaccgcgggataacagtcttttacctccccattcttcaagcctctcatctattaatcgaggaatgctctggtacgtcccggaccaactccgatctccacagcccagaacggcatagtttacatcccgtgctttctctgactctgttccctttaaccagtctacaaatgccgtagcattttgcggaggtttaccgttatacgaagctgtgacgataagaacgacaccttggcggggaatgcggccaacacactcattcagagtggctgcttcacttgggattccatacgaacgccctttttccacaagctctcgggcaatgccttctgccgttcccagattggaaccatataacaccaggagcgaaggcttaccatctgcttcaacggccaggatttctcccctctggctgtcaattgctatatttttatgaacaacaggagcaggtttctcttccacagatctggtagacttattcatcttttgtgacacttcacgcgctttcacctggatccggaagtctcccggcttcaatgtcagtgtctgtttaacatctaactcatagttgctataatcgatcagctcaaaatgtttgaggaccatgccaagcacaagtgttgcttcatataaagcaaactgcatgccgatacacgctctctccccattaccaaaaggtttatacgcatgatgaggcactttcgccgtatcttcaaatcgctctggacggaaaagttccgcatcctctccccatgcctctctgtcacggtgaagctggggcaaaagaatactgcaactctcccctttcttcaagggatatttgccacctatgacggtgtcttctttggcatatacatcaaatcccggggctgttggccagagacgaagcgattcactaagaatcatgcgaatataagaaagctgaagaatttcctcgtactgtggtgagtcactgaccaatatctgatccacctcgtcatacgccttttgaagcgattccggatttttcagtagaaagtaaagagcaaaagataataaaccactcgtggtttcatgtccggcaatgagaaacgtaataatctgataacggatgttctcatcatctagcatttcgccagtctccggatctttgccatttaacatacgtgcgagcaagtcgacctcttcgggtgctgaactcgctttacgttcctctataatctgatctaccagagagaacatcgtctgaatatccgcttggaactgtcgtttggttttcaccataagcagattttgaattttcaaacgtgaactcttttgcatagcttcacttaatgcccgaaccatgctttcaataaaaggactgtggtcctgtctgtaaaaactgttaaatcgataattgaatccacatagtccaatggtatccaacgtaaggcgtgtcatatcatccgcaacatcaatcgtatcgttggaattgaggcgtgcccatttgttgatcaactgttcggcaatatcaaccatcatcggatgataacctttcatggcctgtttgctgaaggtgggaagcagaatgttgtgggcctttttccaattgggctccgatgttctgcttgtaaataaaccatcgcctccaaaggcacgtacattttcgagttcattgtatacaaatttgtcaaaacgggacacatcgcacaactcagcgacaagatctggcccagatacgattaaaccggaataaccgggaacggtaagtcgatatattggtccatgctgttcagccagaacgcctagcgacagcgttggtttatctttatcaattaagggcagattgccaagtggtccatacattttgggttgtggaatgtaagttgcatcactcatgatgatcacctcttaactgtacgccgtagagcaaggtattcgttagccatatgatggctgttctgctttcattcataagtgatctctcctttgaagattatataaatgatagtaatatgtatcatttgataatacaataaaccataattgatttaatatcaaattttcttccggctgaattacttttaattgaaccgttcaacgtttaaattgaataacaacaaatagaggaatgcatatgcaatcccctactttatgaaccaatgacgttatgattctatgacgttttttaatgtattctaatgatgtcttggctcatcccacttctcgaaattcaattcattattaatgcttaccgcagacaaagctcccagagacgcagccgtgattgcctgatatatctcggatgctacatcaccagcactgtatacacccgctatggatgttttgcctgaagcatcaacgataaccgttcctgattctgtaatttcacaaccgatggcctttggcagttctgatccggtaaacagtttcggttggaagaaaactcctgtgcaaggaatcgctgtaccgtcatttagtacaacttgctgtaccatcccttcttcagaattaatggattgaatcggtgcatcgaatacagtaacatgatgctgcttcagctcttcacggtgctcatcggttaaggaatctgatccattcgtacagatcgtataacgttctgtccagccggatatgacttttgccatatgtaatgcgttaactccactaacgatgatgaccagcgcttggtctcttaactcccatccatcacaatatggacacacaaacgcacttttaccgtaaacttctgttaatccgttaatatccaagggaaggtctttcttgcctaccgcaaacaaaatctttttcgtgcgataacttgccccctgagtagtcttaactacaaaatcaccatcgctacctgttatcgcagttgccgtatcggatgcaaattgaactgagggatacgctgcaatctgatctttggcagctttccggaattcacgtggacttgccccatctcttgtcacaaatccatgagtctcccttgtaacccagttacgcggtgtctcatcatcaatgaccacaacgttcttgcgggccctgccaagtactagagctgcattaagccccgctggtcctccaccaataataagtacatccaagagttgattcatattactcatattattcaccctttccagacatttaatatctctaattaaattttaaaaataacctccgctttctcttaagaaagtaatatcggagatttacaagaacacattttaaacaatactattaaagacatcttatatctacaataaacaaaacctaaccattttgcaacatatatctttaactacgttcttcaatccaatctgtgtgagttgaataaaagattatttacacttacactacaatgacagaacaaactttaatcaccgttatacccggatttttggattctctcctgtaacacagaaataattatttaacaattaaaaacaaccttgtttttaaattgttcacaatcaaatgacattattttaaatactaaaacgttaattaaatcacatagtgtattgaatggtataatagcgacataatatacaagtatagatataggaagtgagttcttgaaaacattgaacaatggttcacagaccaatatcagcctggagtatagctcgattccgaaagtattcttcgatacgatcaaaatcggaatcatcaagtccaacctgatcgccatgtttgcgggtttaagtttggctttatatgtatttgatgcttcaatcttagctaatattgtaccaatcatcctttcctttattggatcttctctcattattggagctgcaggggtgtttaacaacttgtatgatcgtgatattgatgcgatcatggaacgtacgaagaaacggcctaccgttacgggacgcgtagataccaagtcgggtctaattctcggtattgcaatcaccatcatcgggggcatcatgttgtacatcgcttccccatccgctgctgtatttggtattttgggtctgttgctttacgtgttcccttacacgatgtggaccaaacgtacaacgatctacaacacggaagtgggaagtctttcgggtgctgtgcctccactcatcggttgggcagccatttcaccggaactgggtcatttcgagatctgggcattggtcgttacgatgctcttatggcaaatgcctcacttctacgggattgcgattcgtcgttttgacgaatacaaagctgctggtgttcccatgctacccgttgttaaaggcatcagacggacatacattcagacaaacgtgtatctggtactgttactgatctccagctttttattctggccgatgagtccatttgtcgctattgtggcatttctggttagcttggcttggctcattctcagtgtggctacctttgacaagaaagaaacagagaaatggtccaaacggatgtttatcttctccattaaccatatcactattatcttcctggtcatcattgcgtattccttgattgctcagatgatgagataataatattccatctttccactcgttataacgataaaaagccttacagactgtcctctttcaaggagtcgtctgtaaggctttttgtttttttattatcttttctaaattttcaaagctatccaactttggcgggggtttgttccccttgccacagcagctgcatctcttcattggtggcaagcaattcggccaaacttccctcggcttcaatgcgtccatctttcatcacgataatgtgatctgctttggaaagtgctgccctgcggtgagaaactgcaatgcaggtgacatccggctcttggaacaacccttcccatacttgttgttctgtctccacatccagtgcactggacaggtcatcaaagataaacaggtccgcctccgtcattaacatgcgtcctgtggccgcgcgctgaatctgcccgcctgacagcatcacccctctgggaccaaccggggtctcaagcccctgatccagatgtttgatatccttctccatcacagccagacgaatggctttttcaagggcttgctcggtgttcccctgtttgccttggacgatattttctttcaacgtatcactgaacaatcttggcacttgaggggtatacgcggctctaggcggcatcaggaatgtggctggatcaacagccgctccattccagtgaatgtcccctttttgtttgggtaacagtccaagaagtgtgcgtacaagcgttgatttacctgatccgatccgtcccgtaataacaagaaattgtccgcgtttcagacggaaactgatctcttttatgccattttcagaattcggatattgataagtcagcttattcacctcaagagattgcaacttctccttagggtccctctgttcacttacaagttccggcggatcttcatacagatagatttccctcgaatccatgatctggtcttcttcccctgggcggaatagcttacgcatacgatcataggataccttgagccttttatgctgaaacaccatataaccaaacagtgaaatgctaaatccgatattggccagataactggtgaataaggcaaaatcacctacggtaaagttccctgctttcatctcagctgcacacatcagtagaatcaatccggtacagatacttagaacatgctgattcatcgatctcatccactgcttgaacagattgtctcgaagtgcagcctggcgacgatcttcattcaactggttaaaacgtgtagagacattctcttcggcctgacccagtttcagggcttgcacggctccaaacgtttccgcaataaaactggtaattcgcccagtcgattctcgattaacctgtgcatatttccgagcccgatttccggacaggttgttaagtaaggtaacgaccaccaacggcagcacggcaaccaatgtgatctgccaattaatgttcgccataatgacgatagacacaacagcaaatacaagacgtccccagaagtctacccatgattccacatactcgacgacttcatccacatcatcccgaaagcgactcatcgcttcccctggtgaagccggaagattacgtcccggccagcgcatgatcgctgcgagcatgttggttcgcaaaatcgcctgaacatgatacagatacgtaacccatgcatagaaggctacaaaaaatgtgcccacccgtgccattcggaccaaagcaataaagataagcggcacagcaagccacatgtagtcattagaacccgctgttgtccgatcaaaaaaccactgcatcccaataccaatagctaacggcaaggaatgaaatatacaccataacaatccgttgattataaacaacaaaggcctgaatcgaaacaaacggcctataaatcctgctacagtcatgccaattcctcctctctgcctgtaatcagcagtctggcatagtgagatgccgggttattggcaagttcttctctcgctccaaactccagtaccttcccatcacctagcaccataatccggtcaactttctccaacgtagccagtcggtgagcaataatgactccagtggatcgtttcattaactggtcaattgcagattgcagcataccttcggtcgcagcatccagacgtgacgaaggctcatccagaataaccagacttggttcggtcaggaatacgcgggttaaggcaaataactgtgcttcccctgccgacaatgaagctccacctgctgccagatacgtatcgagtccttctggttgtgaattaatccactggctaagtccaaggcgatccgtcgtttccttgatcatctgatccgatacatccccattgaacagggtcagattgtcacgcagcgtgccatcaaacagctgtacatcctgtgtcaccatacccacccggcgatagagtgcttgtaacgaaagctttgtgatatctgttccacctacacggatcgtgccccgatccagattgtacaggcggagaagaacacgactaagactcgacttaccgctacctgtgcgaccgatgattcccagacgttccccaggcttaatggcaaaagtaatgtcctgcaataccggtttatcctggttataactgaagtgcacctgactgaattccagaccaagtggtccttccggcaattgctcctctgtgccctcttcaatctcactctgcatggacaacagctctctggagcgcagcatgccggattttgctttttgaaactcctgcacctgatctccaagcatctcaatcggatcattcagcatctgcgtatattgatagatcagaaataatgttccaatactaattagaccttccatataataatgcacacccagtaaaagtaccgcagtgaccgccagagcgaacagaactactgtggtattccacggaataacccgtagcagccaggcttttctccccttacggaataccgtgcgcatcgtgcggtaaaagcggttcatcacatagggcacatgaccattcgcttgcacatcttcaatcccggcaatgcgttcttcaattaatccgaacagagaggcacttgctgcccgttcatttttggaagagtccacgcctagatttcggatgaagaccatgaacaggatcgataataatgtgaaaacggtcatcaccaaagcaataggcacattaacactgaacatgaatccgagaattccggccagcagcacaaaactcccgatcacttgcacaatgaacattgcgaaaaaattggagatactcgttacgtcaccatccacacgttcaatcatctctccaggtgttttcacattatgaaaacgcatatcaagacgcaggcagtgcttcagcagatctccgcgcagttgattcgtggcccgccaggccacgtcgttccccaaataactgaccgctaccgtgatgagttgattaaacacggcaacaaccaaaaatattcctgcgagctgaacaagattggtgaggactcccccacttgctgctgtatcaataaatcgtttaataatctgtggattcaaaagctgaagccccgttgatgtgagcaacatgattaaaagtaaggccagccgtcctttaactggttttagataacgcagcagccatgacatggagattttctctgttttgggcacaggtcccacctctttataggtttatttaattgttcttggctattcatatttgttgatgatcttaacgacagcaaatttgcgatcactaggatgagtcatacataatgacattaaaatcgggatttcccgcccataattgatatgtagaacgtaagttgaccattgtacattctccttttaacaagttagttttttataaaataacgctccaaacgctcctttccatgtgaacaaattgggtggaatgcatgaaaaaaagccatagatgaactaatgttcatctacagcttgtagccaaaagagatcgaatgaaatgcaaagcatttcccgtatctcctctgcatcgcaataatgatgagcgtccacgacagaggtgcacaaacatgactgtcccaacgcgatcattgcaaaaaaattggattaatgtcactatgctcatgcgtattcagttatcgattcgaaatctgtataggcataaacataatcatcatcccacccgtttcacatatttgttgtttattgtattcgctggactaacatccgtcaagataattttaactgaattgttatttaattcatgccattaaacttttcaaatctcgctacatacttaatgatgtaggctctgtttgcttctctctaacaacaagacgtctgtgcgctatcagaagaaaaggtactcccagagcagtcgtcagcgcaatcggtagaaaaacagcgaacccattctccgctccaaattgacttaacaacacccctcccatgacaggagcaatgacactaccgatattattgaatccgatggtaccgaaatacgttcctttccattccggctttgcaatccggtcaatgagcatatccatcatggtgaacaacagcacttccccaatggtaaatagtatgacactcatcatcatcatgagtacaccttcagcaattccgaccatcatcagactggttgcaaccagcaggttacccacaatcagaggaacaagcggtggaaagtttcggaaggttcgcacaagcggatactgaataatcagtaccgtcacggcattcagggaaagcatgtacgagaacatctgacttccattttcaaagatcgggctcctcgccaagtactgtgccaacgtagaactaaagtgcccgtaacccagaacacaaaatgtggtaccgattaatactggcagaaacacccggtcgcgaccggtggttatgagtgcttcacgcaaacgtggtgcggttgcctgatgacgctctggcagattggcatgctgtagcttgaattgcagaaataatacaagtccataggctatgtatatcaagccggaaatcacaaatgggaacgttgattcagatgatcccagctgaaatccgataattggcccaaagaccacaccaagattaactgcagcatatctgaggttgaacaccagcaatttgttctccggagaagtaatatccgataacagcgctctggaggtgggctcaaatactgcgcggcataatccgtttaacgtattggcaacaaagaatacccatagatgctctgctgctgaaaagataaaaaacacacctgcccagctaaataccgagattaacatcacaattttgcgaccgatccggtccgaaatataacctccataaaagctgaccataacacctgccagcgagctaacggccacagtaataccggtctgggtcggtgtagcatctaacacacgtgtcagatagatggatagaaacgggatactcattgacgtcacaagacgtccaaacatggttccgataatgatcgtccatgccaaggggtgaatctgccttaaatattgcttcatgcgaacttctcctattctttctaagtgcttcaatgcggggtgatttaacagcctcttctaatgagtgttcaaaaagtccggttttcagtactttttgaacaacttctactaatgtataattgtaaggataaaagggggaaagaaaagtgtaaacatatgatcacacttttcacctttaataaaggagtcatgaccatggataccctacatacacactttataaggctcgccggcgctgaacaactttcattcaaacttcatgaacctgtagcggtaacgattgatagcctgtccgctgccttgtgctgcacccctcgtaatgtgaaattcattctcagaaaattggaggaacaaggctttatccattggcagcctgggcgtggtcgtggacatcattcggagttaacaatgctgcgtagcatgaatgaagcgttggaagcgagttttaccgaacttttgggtaaaggcaaaatgaaagatgccattgaactcatcggaaccgttcagatggatgatacattgcgagaacagctcatgctctcccttcatcaacagatgggatttcacggccacgatgaaactgcctctggtcaggatatcctgcgcatcatgaggtcacgccagttaggtgatttggacccagcctttgtttatactgcatttgaaatctacctattaagccaggtctgtaatacattgatcacttatgacgccaagacggagtcattcctgccagcactggcgcacatgtgggagtgtagcgaggaccatcgcttatggaccttctatcttcgcaaaggtgtacgtttccacaacggacgtatcatgacgtcccgggatgtgcaagcgacgttgcaacgattgattgatgtgcatagtccgtccatctggttgtatcgggatattgaacgagcggaagtagctgggcattactgcatcaagtttgttctacatcgtcctaatcggtttttcttgcatctgttcagttgtattcggatgacaatcctgccctacgattacaatgtagccaatacattgataggtaccggtccttttcagatctctgagctgaatgcagatgtgctggagcttaccgcttttgatgcgtactacggcatccggccacatctggatcaagtccatttctggtttgtgcctgacctgagtccgaatgatcgctattatgagctaccgggtacagatcgattgagtctcgcaacaggctgtgatcagaccaacagtatcaattatccggcgctgggttgtcagtatatgctgttcaattttcacaaggaaggcatccatcaacatcccctatttcgccaagccctgcgtatcgtctatgattcggtcgcgcttgtccgagatctcggtgggaatcggatcacaccggccagcagcttccttccttggagaagtgcagcccaagactggaccgttgcttctcttgaacatgctcgtgatttactgcataactgtgggtaccagggtgagacggtaacattatcgtataagcataataaggatgcagacgttgcggagtggttccaacgtcgtgcagcgtacattggtctgaacatcagcatgcaggccgttgtggattacttcaactcagaggagaccatgaacgcgcaattgatcctcgctgaagagatactggaggaagattggcagtacggcatgattcattttttcaaaaacctgtccaaccattttcatatgtgtatgtctcctgcattccagtctcaattggatgacaaactggatcattttgcaacgcttcatcgggcagaacgtactgcgctcctggatgaagctgaagccttgctacgtgatcactgctggatcttgcatggctgtcacatgaacaagcaggctgaactggatcagagcatcttcggcatgcagatcgcagaattcggttatctggacatctccaaattgtggatcaaaaacccttagagatttgtgcataaaaaagctgctagcctatttatgataagctagcagctttttactcatgaatccatttgtaacgcgttcagagattatttttgatgtaatagctctccaatgcttgcataatggactcaattttgatcggtttgctgacatacgcatccatgcctgccttcaagcagttttccatgtctcctcttacggcatttgcagttaccgcaataatgaatgggcaactctcgggatgcaaagcatttttaatcgcttttgtcgcttcgaatccattaagccttggcatatgcacatccatgaagacaatatcatatgaagtgtgtttgaccgcctcgactgcctcaacaccgtccgccacatgatccacgaaatgcccttttttctcaacgattctgctaaggacgagctgattcacctcattgtcttctgcaattaaaatccgtaaggctgatgttctgctcttcttctgctgttgatccaacctgttgctctcttcaccgttatttaatttaaattgggcggtaaatataaatattgtacccggttcatccgattcctggatccagatctcaccctgcataagttccaccagtttcttgctaatggcaaggccaagaccggtaccttgaggtttgcgggtcataaaattctccagttggtagaaaggttcaaataactgttgtttcctctcagccggaatgccaatgcccgaatcttttacctgaaaataaagctgcacgttattgccgcactgctccttaactcccactttaacttccacgccgccttctgaagtgaatttgaccgcgttgccaatgatattggtaagtacctgtttaagacgataagcatcaccatacaccggagttggaataacatcttctacgcacatgcgaacatccagcttcttttcacgagccagcggttttacgatttgcaccgtctcggtcacgatctctacgagatcaaaaggatcttctaccagatcggttttgcctgattcgattttggaaaaatcaagaatatcattaatgatggccagcaaggaatctccactcttctggatgatttcgatatattccttttgttccccgctaagtccaggagtatccaaaagcaaatccgtcatcccaattacaccgttcataggtgtgcggatttcatgactcatcatcgccaaaaattcacttttggccttattcattctctccgctgtctctttggctaccagcagttttttctgctccgtaatatccttcgcaatcaggtaaaacccgacattggatgtattaataatgattggagcaagcgtagccaagacttctgtctcagatccattcgtgtgccgaacagcgttgatctccttttcagccatctcatagttactgcccagaatcagacccagattactggctccgataaatctgcttatacttgtaccgatcatttcagccacgggacaacccgtcattttcaccgctactggatttgcattcataatattaccatccatattaaacgagataatggcgtcatgattgtatttcttaagcgaagtgtatcgctccacagattcctgcaatttaaattcgatgcgcttgcgttcagtgatatcctgtagtgttccgttcagctgaactggctgaccatgctcatcaagcgtaattaatccacgcaagtgaagatacttctcatttccatcagagctgatgtgtttgtattcaaaatcgagcggttcaccctgttttacccctgcaatatgtttttgtaaagaggttatctcttcggcatccataacatcaaaaacatcacttatccgatatggtttgcaggtgcgttcaagttcaaaaatctcaaagatctgatctgaaaatgtaatatggtctaagaccatatcccattcccaactaccaatcaaggcgatacgttcagcctctgcactgatatccttttgtttttttcgctctgatatatctcgtccaattgtaaaaatctgctgttcatgctccgcatcaccaaagaccttgtatgtggtttcaaaccaaagataatgcccgtctttatggcggactctaatattcaacagattacctttagtcaaatccatctgtgagatccgttccagatcttgtgggtgaaaggaagcattattgttttggccaatgacttcttccggggaataacctaatatttgttggactgacggtgagcagaaccgacaaactccctctgaatcggcaatatagatgatctcctgagcatgatccgtgataagtttaaacatttcttcacgatggagaagtttttgttcagacagtttacgattggaaatatcaacaatatggcaaacggaataaagaggttcatccgtaatttcgtttcgaaccaaggaaacatgtattgaacaccataagatgtcaccatttttattaatgtaacgtttttcgtattgatcttcttttgatttaccttcaaatagctcataactacagatcatatcttgtgagaaatcatccggatgtgtaatatcctgatacgtaagatccattaattcatcacttgtataacctagcatacagcaaaaagcagggttcactttcatccattgccctgttggagcaacgagtgcaatcccaataggtgcttggttatagatctgctcgaacaattcatgatgatcgaccttttgaacctgcattgtaagttctccttttggcatagactccatgtaaattttgtcgaaatctaaaatttttactgatataagatgttctataaaaattagtcagttttaaaacaacagtacctgcttaatacccagaatttcaaccgttgaaacaaatctttttaagagatttgtgtctttaaaccaaacaaggcccggaatccatccacatggaatcccgaactttgtcattatatatcattatgagtcatatgcaacacggaatcattagaaaaatgggttagcgctcgcgaccaataagataatccaataaatgtctcaaaaatggaataggtttcggcatctcgttcaatgcatctgtagcaagacaataatgctcccacatcgctttcttcgcgccttcatcacccagaatagacacaaaggttgaattgttgttccgctcatcctgacctgcaggtttcccaagaatgaggtgattcccctcgaaatccagcaagtcgtccttgatctggaaggcgatccccgcatgataagcgaactttttcagcgcagccatctccggttccttcacttgggcaagtatcgctggcatgaccagggcagcttcgaaggcaatgccagttttgtaaaaacagatgatgttcaactgctccagcgtcaatgccttgcctttggaattcagatccatggcctgccccatacacatatcctctgctttttcagccgaatactggatgagtctgagcacggtcgccgcatcaaaacgattcaatgaggattgctctccaatcgccttctggataagaaatagaccggttagctctgctgtggcactattgtgcacatggtgcagcgttgaacgtccacgtcttgtcgaagcattatcctgcgtaggcagatcatcaaagatcagggaagcggtatgcatgtactccaatgatcttagcagcggaacgatggatgattcatgaagaccatactcgcgcacgcccataacccaagttaatatcggacgtaacctttttccgtcgccttgcaaactgtaattggctgcatcgatcagcgtttctttcatctcatgaaggccaccgggcttcgcaatctgcaactccacattaatctgttcgcgaaccgttcgaatggtctgtttgaactcctctttttcctgcttgtcatttttcaattgaagcacaacctgatcccgtaacaatttatcaaggaaatcaacgtcatctgcttttcgcaccatctgttgaaccagttgattgaattcaggctgcccagaggcaaagatcgtcatcacttcatcatatttttgctgccccaaccgttctttacaacgcttcagcccgttaatggcacgatccagtatgacctcacgggtcttggcatccgagttgtaaacatcatggattagatgagagatgactgcccaatacaattcatatggattaatcaaatcgggacgcaaatctcgatacttcaaatagtacgtatatggagttactgccccttcttccatatcgtcaaacatatcggcaaaatcatcagccaactgattatatatcccgtaatagaacgttcgcagatcaaatccttcatccaccggtgcactgagaacagaccggacgattaatcgggaagaagaagatttgataataatcggaatgtacagttcttcattgctataattcgcattggctaatttcttgttgcgatcgatctcctgagactgaaagaacacataggattgctctaaaaacgtgcgctgtttctctggatgctggtagttcttgatgtactcaaatgcttcccgaagctcggaatgtacatattcaattacttcaagattgctgcctttccaatctcccagatcaggtacgaccccggtaagaagtgcatcgcgtatcatcagggaatattgttctttttcttgaacagtcaaagcttgagaatccagcagatcatccacaaatggatacgtcaaaccgtacgaataaccaagtcggatcgccgcatcaaatctccgggcacgttcttcaggtggtgtctgctcattcatctcatcgtccacatgaaggaccacgccaagaatgatcttgatgagcttccgttgcgcctgctctgcatccagctccttcgggatgttggatgctacattctttaatttgttcatcacccagatgacagccgtttcaatgtgctccttctgtccccatcggtacaacgcagccagactgatataatcaggctgtccttttcgcccagtagctgagcccataaagtattttttagtattctggacaacgttctgaattcgggcctgcgtacccggagaatcaagggcttgccccagatctcgcatataaatataggagatactccgatccaggtaatcatccagctttcctgtcgtattcagccagtggatatatctatgaacatcccgaggatccggttttcttttgctaggtgataaaagagaaagccaggcaaaacgatgaatatgtttcttttgccatacatgaatatcttgggtaagtgctattgtatacgtattatccataagttgctgcctaagagaagtaaaatactgagatgctttctgctcagctagccgatatcctgcatcagcctgttctgtaagtacgttattcatagggtggatacctcaaattctattaatgttaaacatgtatccatgaaaggagatgaggtgctccatggacgaaaactgaactcatttgatcgtgtatccaacgcttcagctcatgttcataacctttatacggcgatccaaccgtttggttacgaaatcgtcattgttcattcccatatacgtgattttacagaatggatgaccagactttgaccgctgtgatggcgataagtacgattaatgcatatcgaagtaccctcacattaatcatcgaactaacccgtgaaccaagggatgccccgagcagactgccgatcaccgtatagatgatgggttccaccggaatgtctccacccgtaattttccctataacgccgccgattgcggagataaatacaatcgccagtgaagaagcaatcgtcgttcgtacggggatattgagaatcgtcagcatgatgggaataaggataaaggcaccacccgcaccaacaattcctgatacaatgcctactgcaaaagcagtgcctgctgcaatccattggttaaacaccagtggagctgaggtatcaagctttccctttccgggaatcagcataagcacaatcgccatgatcgccagaatgccatagatcagattaataatccttccgtccagatgaccggatatgaacccgccgatcagactgccagcaagaatgctggagcccatgtacagcaccaatccgcggtgaacgattgccccaccacttctacccgtttttacttttctccggaatgcaatcacaccggcaagtgcagcaaaaaacacttgaaacatactgatcgaagatacctgatgtgctgagaacggctccaatcccacccaggatggaacatataacagcagcggataattgataatggccccaccaatacccaacaaaccggagaagaatgaaccgaccagacccagtataaacatgatgacaaaaagcagaagatccatcggttatgcgcttcctttcgtgcaatataaatctcatttcgatatcactcaaaagtgctatacacagcgaatattatccgttataataaaaaccaagtaaattaatccgaaatgagtgattaagcatgtttaacgtgttgaagactctttttgaaaataaatgtccacagtgcaacgaaaaattacaagttcataacgatgcgttatgttcgaccaaaacctgttctcaatgtcattacaaagaagagagttatggctctctcggagttcgaattgtatatgacaccacaaaatgataaaaagctataaccttgttaattgtatcacgatctctgaaatttcgggatgattcgacaaacttatttccatctcatatgccatgattactttataatgaaaatacaaaaacggtgcaaaacgaattaatcgttctgcaccgttttttttctgtttttttgagatgagttctcttaattttagaaggttatttatttggttttgaagctgaggaatccatcatctacggctacagttgtaccattaactgcactggctgcatcactgaacaggaatgtaaccacactggctactttctccggttgaatgagctctccacgcatatgttgagtagcaagcgcatccttcatggcttggtcatcacccagaatcggtgtttcgataaagccaggtgctacaccaactacacgaattccatgctcagctagttccaatgcaccggatttggacatcataacaacagcagccttggctgcgttgtagttgaagctacctactgcagcaacgcttccatagatcgaagctgtatttacaatagtaccttgtacatttaattcaaccatttttttcgcgccataatacataccgtagtatacactgtgctgatctacatcaataactctgtgataggattccgggtccatctccagaaatggcttcacaagtccaatgcctgcgttattgaaaataccgcttaacgtaccatattgctctacggtccagtcgatcagggctttgatctcgtcccctttggatacatccactttgtacgcgcccgctgttccgcctgctgcttcaatctctgccgcaagcttcttcgctccgtcttcattgtagtcagcgacaacaatagtcgcaccttgatccgaaagttgaagtgctgtttctttaccaataccactggctccgcctgtaataatgattacttttccattgtgttgagtcataactcagctctcctttggcaaaatagttttaggtgcagttctaaacttatagtaagtaactatattttattaacttatatacttatcatacgcctctgtcccaaccttgtcaaaccatagatcatcttcacataaataagagataaatgtcatatacatctcctatttacatgatatagtctagctcctgtaatattaaatatgcatgagttttcggaaaataaaaaagcgagcataacggtaattcaatcattccgatatctcgcccttctcaagtattcgattccaaactggattgtcttaatgtggtaagatcaattcaatttattccccctgaagtccgctaagcggatctttcaaattattgatgttggtgatcagttcaggaatgcctgtcttctcccaattttctgccgtaaaaccttgctctgcaattgtattctcgaaattgttcacgacttctgttaattgcgtattataactgaccagattctcatgaatgctctctcctattgcaggtgcagtcaactgagaaaattcgcttgcctctgcttggatcagatcgattttctcctgaatctgcgttgtaacctccggattattcaccgcacccgatgcaagctcttgcagatcagccccggcggttgatacctgttctatataatcagtagccccactcacataatttaaactttgattagcttgttccacgacagaacaggctgaaatcagcagaatacttgatgcaataaggcctgtcatcattaatgtgtgctttctttttcttatgaacatgatcatctccccttctcctaatcggaatccttgttccaagtccatgatacctgttcagactacttcattgcaaatgggtctgcagccaacattattaacatgtataatagtaaaatcacacggtaaagggatgtcatgattatgcttcaagccttgaaccaacgcttgaaccgcatcatgccactgattaccccaatcagtattattattggcgtgttatgcgggagttttctttcttcttatacctttttatccccttggctttttgcgttcatgacgttcgctggaagtatcagtcttgggatacgggattttgtgaacgtgctgaaaaagccgttccccctgtttgtatgtctgtttattttgcatttggcgatgcctctaattgctctcggtatgggtcatctggttttccctacagatgcgtacaccataacgggccttgttctggcagccgtgattccgacaggaataagcagcttcatctgggttagtatctatcggggcaatatcgcacttacgctttccatcatcctgattgataccatgcttgctccttttgtagtgcccggggtgttatccctgttaatcggcaccagtgttacactggacacagcagccatgatgagcagtctgttctggatgattgttgtaccatccctgctcggtatgctgctgaatgagtggaccaaaggcgccattgtcccggtctggggaccaaggttgaatccgttatccaaattgttcatggcatctgtcgttgcgattaacggatctgtcgttgcgccctacttggctgatttcaactggaagttggctggtcttgcggtcatcattattttcctggcatcattcggttatgcgctaagttacttcattgctcgattgttgggttggaatgaagccgatcaggtagccctggtgttcaatggaggtatgcgtaatatcagcgcaggtgcagtactcgctgtttcgtattttccaccacctgttgctgtcccggttgtgcttggcatggtattccagcagatgctcgcttccctgacaggttatctgctcggtcgtcgatcgcagcttctgcaaaagtcggataagacatccgctgcctaacaaaatattggaatgttaaaaaacgccgacatgattgtcggcgttttgatttgtgttgctattattactattattgctacgatactgctacgtttcgtaaacctagcaatcagttcttggctacaaatccactttcatattgcccagcatcttggcaacttcaggattatcaatcttcatgaatagactttccttggtatccagtgtggaaatggttgcaatctcttccgggcttagtacaaagtcgaaaatatcgaagttctcgataagccgctctttgcgtactgattttggaataacaacaacatcccgctgcacaagccagcgcagtacaacctgggcgacagatttgttatgtttctcggcaatggaaaccaagacttcgttgctgaataaattgttgcgaccttcggcgaacggggaccatgactggtgctgtatcccctgttctttcatgaaaacagcgctgtcgacctgctgttgaaacggatgcgtttcgatctgattgatgacaggcacaacttcgttgtggacgatgaggtccatcaggcggtcaggtaggaagttactgacaccgatagccctgatcttgccctcacggtatagttcttccatcgcacgccatgcgccgtagtaatcaccaaacggcatgtgaataaggtacatatccagataatcgagctgaagcttacttaacgatttggcaaacgcccgcttggcactttcgtatcctgcatcctgaatccaaagctttgtcgtgatgaaaagttcttcccgcgctatgccactgcgtttaattgcacgtccaaccgcttcttcgtttaggtaaccggcagcggtatcaattaggcggtaaccggccttcagcgcctcatataccgtgttctcacattcatcagcatcgggaacctggtagacaccaaagccaataatcggcattttcactccattgttcaaggttacagtttgcatattcaattcctcctatggtccaattgtgaatcgcaagtggtcacgtattcctgaaattcagcaacaaagcgaggattccacttccggccgacttgcgttacaataaccctagctccttcgtcttacacgaagtcaagcggtctccaatatttttttagaaggaggagtacatatgtatactgtccaggatgctgcccagcttacgggactcacagagcacgctgttcgcttttacacggataaaggcttggttccgagcattcaacgcaataaaaataatattcgggtgtttgatgaagaatccatcaattggctacatggcgtcaaatgcctcaagcagacaggtttaccgattgaaaatattaaaacatacgtcgatctctgcctcgaaggtgattcaaccgtttcgcagcgattcgcacttatgatggagtataaggaagcggcgctgattcagcttgaagaggccaagagccgcgtagcccatttggaagagaaagcacgtcaatatcaggctattttggagcagcgcatcccggatatgaccaacccggtcaattgggaaaccaagcgtgacgaagaagggagttgtcctgcatcccgtttaaaaagtcgcagtcttcctgaagccgaggtttcggctcagtgcccagcagctgctatgaagcagcaaactagcatagtatcttaaacttcacatgatatagctcacgtatgttctaaacatataggctatttcttacattatgtatatctaaatgagcctgagtaaaaaacgccgacaacattgtcggcgtttttcgccactacaaccctctgctgggatctctttaatctattcctgcccattttctggtccctgttcacaatacaaaaaaaccatcaacaagtgatggtttttcatgaaatatcctgttcagaaatctgttgctcatgatgcctttatgcttatttcggttgaatatatccttcagcttttagcagttctgcgatcagaaccgcgccacctgccgctccacggagcgtgttgtgggacaatcccacgaatttgtaatcgtagagtgagtcttcgcgcagtcggcctgtggagacacccattccgcgttcgatgtcacgatccagtttagtctgtggtctgttctcttcttcaaaatacgtaatgaattgttttggtgcacttggcagagccagttcctgcggacgacctttgaactgtaaccaacgctccaaaatttcgtctttacttggttttttctcgaagtttacaaacacggtcgccagatgtccatccgttaccggcacacgaatacattgtgttgtaattaatggagccgatgctttgacgatctcattattttcgatgctgccccagatccggagtggttcctgctcactcttctcttcttcgccaccgatgtatggaatgacattatcaagcatatcaggccagtccgtaaagtttttacctgctccggagattgcttgatacgtggaagccacgacctgagtcgggttgaactcacgcaaggcgtgcagtgctggcacatagctctgaatcgagcagtttggttttacagcaatgaatccggtttttgtgcccaaacgtttgcgttgagcttcaatcacgtccagatgtcccgggttaatctcagggattaccattggtacatctgctgtccagcggtgagccgagttgttggacacgacaggtgtgcctgttctagcgtaagcttcttcgagcgcttgaatttcattctttttcatatcaaccgcgcagaaaataaagtcaacctggctggcaaaagcctcaacctgggaagcatcctgaacaacgatttttttcacagcttccggaataggaactgcgagtttccatctgccttgtacggattcttcatatgttttacctgccgaattggcgcttgcagaaatagctgttacttcaaaccatggatgttgatcaagcaggtccacaaaacgctgacccaccattcccgttcctccgacgataccaactttcaattttgctgacattcaatcatcatttcctttcggtttaagtgattcttctcttcaaatcaatttcataactcactaaaaacgtattatgaaattgacttcctaattaacactattcaggcaattccaaagcgtgtagtcacaccccggaaaaaccaaaaaatcccatccccaagacaatagtctcagggacgagattgaactctcgtggtaccacccagattcgccaatatgtcaccatatcagcctcttcaagtaaaggtttacaaccatgttgaaagctgtagaccgttcatactctagctctgtaacaggagctcctgtcacaccatcccttaaatgctaagttccgatgtgctgctctgagtctttattcaataaaaagttctttactccttttcagctaccggagctctctttgaaagaatgatttttatctactcgtctcttcgtcgcatttgatattgcgattataatatcaaaattactgtgatgaagtaaacacatttttttagatcatggaatttatatgtttccagcggagctgaaccattcaattaccgcaagaaaaatttcagctacatgcggtcaatcttctgtgatagcacgtcgatagacatctttattataacatactacaaatggttatttccttactgctttttggcaaccatcgcatacgttcccagtgggctcccgggccccgagacatgatgtgtcttaagtaatttcagttcggaaagaagaagtgtctttactttgtccgggatcggaagcagtttcagttccacaggcgcttctgccagtgtcatttcggtttcccagcgaccgtcctgcagctcgggagaatggatcgaattctcttccttaatcgtccagcctgccgcagagacaagctcttggatgtcctccggtgtaaagagcgtgcgcacattggagaagctgttctccttgtaacattcgacctgggactgaatcagaacggataaccaatgtgagagctggctcacatctgtaactcgggcatcccattctgcaaaacataactcatgtccccacgtcctaaccttgctaagaatctcggcgagttcgtcaaacgatttcaagtaccaagaacaatgggaaagtacaataacatcaaactcattctcggtgaattgaacctgatcacttaaaatgtcaaaatcataatccattcgaattcgatcacccagtggagatctccgcagcttggctgccgcttcgcctacggtcagcggtgtaccataatcctccggtgcaatatctacaccatgaacgtacccgtgctcccccaccagatgtgcaagcacggccgttgtatctccctgaccacacccgatttccagaacccggctgccttcctgtatcccccaaaagagtcccagtttcatccgatgctcggtctgaatgtactgaatggcggcgttgtcctccacgtccatatacttaataaggtccctgatgatagattcattcatgattcctcactcctcaaagagcaacctaaacttcttgctaattgtagcgttactggaataattgtacaccactagagtctatgacagaaccatggcacggaggagaactcgtcctatagcagatctaaacctctgctacctatcaattcctatgcccactgagttgcaagcttctgaagatagggtgtcagcatgggctgtaattccttacgcaacagtccgatctccaagatcgcctgaatatatccgaattgatcgcctatatcgtagcgacgcccctccagttcaagggccaacagttcctccacctgacttacttctttcaaggcatccgttaactgatattcccctccagcacctctctcgatctgatccaggattggaaagatggaaggtttcagaatgtatcgtcccattacagctgttcgggatggcgcttctgcaagggaaggtttttcgaccagattggtgactcggtgaacccggtcctctgcaccattcgaatcaataatgccatatttgctcacatttgccgcgtctacctgacgaacaccaatgatctggttgcctgtcttttcatagagatggaccatctgtgcaagtgcaggtggatcagacaccataatgtcatctccgagcaatacagcgaaggcatcatcccctacaaattgccgtgcacacccaatggcatgccccagtcccagcggttctttttgacgaataaaatgaatattggccatctcgctgatggcctgcacctcttccagtaaagactgtttgcccttggcatataaagagtgttcaagttcaaccgatttatcaaaatggtcctctatggattttttgttgcgtccggtcacaatgaggatattctcaatgcctgattgcactgcttcttcaacaatgtattggatggccggtttgtctacaatcggtaacatttctttgggctgtgctttcgtcgcgggcaggaaacgggttcctagacccgctgccggaataactgcttttttaattagcatatcatcatacactcctttcatttgcttcttataaccaatattgcacgctgtgggcagctaagtagcgatacgaaacacccaatatctgctggccatatagttcagaaccatccccatcaaggtcgccaggatcttgctcatcacgagactccaacccagcatgtcgtgcaaagtcatcagaatgagggtagataacgcgagaacgatgagattggtgattagaaaacgaataagttttgctctatcgccacctcctcgtgccgtatctcgaaaagtccacctgccgttcatccaataactgttcgcaacaccgcagctgtacgagattacttgagccatcagaaccggtacaccgaccactgcaagcaaagcaaacaccaccgcatccactgtcgtatttgcaacacccacaataccgaacttgaaaagtgtcaccagacgcttagtcatgatgagcaactcgaactgtcaattgggattttgcttgctggccctcggcctgcaccacatctctcacaatgtatagcggacgcgccttggtctcatcatagatgcggcccacgtactcgcccagaatgcccagcatgatcaggatgaatccgttaaacatcagcatgatactcacaatggatggccatcccttaattgttgaatctgtaaagatggccgaaacaataaccgttaacatatagatgaatccgccaaccgacaggatcgcacctacataacctgcgagcttgagcggtttatacgaaaatgaagtaatgccatccaggctaagcttcagcatgcgtttcagcggatactttgtttcgcctgccagacgttcatcgcgttcatattcaatagcagtctgacgaaatccgacccaactgaccaacccgcgcacaaaccggtttttctccggaagacgtttcatctcatcacataccttgcgatcaatcaggcgaaaatctccggtgtccactggaatatccgtatccgttgacgcacgcagtacacggtagaacagacttgccgaccatttcttgaagcgagtttcaccgcttcgtctggtgcgacgggcatatacgacttcatagccctctttccacttggcgatcatatccagtatcagttcgggagggtcctgcagatccgcatcaataataacgaccgcatcccccgctgcataatccatacctgctgttatcgcaatctgatgtccgaagttacgggcaaaatcaatcagtttcacactctcgtcccaacgggcgtaatcacggatcatctgtgcactttgatccacgctgccatcattaacaaacaacagttcatagctctctcctgtgctgcccatgaccttcttcagacgccgataagtctcctcgatcactgcttcctcgttatacatgggaataataatgctgtaccggtacgcgtgagccatgtttgtcccctcccttttccaatggacttcgttcgagatttttattctatacaaattgaactaaagaatatttacactgcacacttcgatgacagaccaaccttccaatcgctgttatccccagatttttttgattccctttataaagggaaaatccggggatagcgtatgcttccgatgtagctttcttgcagaaagcttgtaggcgaacgcttcgctttttcaggttttttctgtcctctccgttattgtgtaaatgataagttcaatttatatagctacaatttcacttcgtacaaggtggtctgtccgccaaatccgaacccgaatccaaatccaagtccagcttcattctccgtgtcaccgttatccatggatccgctgtcggtgcctgtctgccattctgacgttggaatctcggttccgtgttctttgatccaatcgctaatatctgagttccctccgcggccacccatgccaccaaccatgaagtatttcacttgcccgctcttgacgagttgctccagttcctctgttgtgtacaccgggtctgacccggagaaacctccaagcgtaatgaccgctgctctttcatcgatgatataaggtgccgcctgattatagtccgtagtagcgaagagatacgtttcgcctgtattatgctccttcagataattcagtgtggctgtatccacttcttcgttacggttgcccattccgccacggccacccattgtaggcatttctgtgtctcctgcaccgttacccatcggcatgcccattcctgctccaccaaacataccattggaaccagtaggtcctgctgccggaatcatgctgttgccaccataagttattggggtgaatgcccagtagattggaccgatcagcatcactatgaatcccgcgataatgaagccctgtttccattgatgtgtgcgatgaagcataacgattaggatgaccgtgaccataatgcctgcgatcaattcactaatggaccagcctgcaccaatcgtatcgttatacacctgcatgatataccagccgaacagagtcgtcagcaacacggacaccggaagcaaccatgcctgccagccattgcgatcacgatatgacttccacatcgctacaaatcctgcgccagtcagcgccgcaattggaggtgcaagcataatcagataatactgatggaagaaacctgccacactgaaaaaagcagcaacgggaagcagccaggccagccagaacaaggcttccttgtgcttgttggttatatttctccgtcttaatcctgcaaatatggcaatgcatccaagcagcacaactggcagaagccagctagcttggcctgacagttcagtctggaacagacgcagaggacctttctcccccgtaccaaacattccgcccatgcctccgccgaaatttcttccatttggcatttccatatcatttggcatctgcccgttcgggaaattgccattcggcccattcatgctgcccatggtgttcaagccgttcgaaccactcatattatcgttatccggtgcattgacatcttgcccaacgccaggaacatcactgcctgtctgattagggcctgaagtcgagtctcctcgattgccacgattatctccctgtcccataccatttggcatagctgcgttacctgcagtattctgctgacccgttaggcgagccagaccattgtatccaaaggcgagttccatgaccgagtttgtttcactgctaccgatataaggccgctcgtcttcggggatagaatccacagtgaccgcccaggataaggaaaccaccgccagaatcgccgtgctgccgatcagcaggatgatcttccttctccatttcgcctgaaatgcgagcagatagaacaagtaaaaagccgggagaatcatgtaggcttgaagcattttcatattaaaggctacgcctattaacccaaaagcaaccagaatgcgccaagtactgccttgtttgctgcctttgaacaaaaaccatgaactcagcagtagtgtaaacaccagcatgctgtcaatattgttggtccgactcactgccgccacgacaggcacagttgccaatgtaagtgccgaaattcgtgctgctgcaagaccatatgtaggtttcaccatgaaatagatcaggagcaccgaaccgattcccgctaatacttgaggcaaaataacactccatccgtgcaatccgaagacataggcaaaggccgtctggatccagaagacaacaggtggtttatctacagtgaccgagcctgccgagtcgagtgatgcatagaaaaagttatggaagttgctgagcatactcccaacggcagtcgtgtaataggaattggcatattgatcgttccagataccgtacccattcagaaatgccgccagtaatacaatcggcagaaggacaagatccatccttcttttggtgttattcaatgttaatcactccttcaaagttcttcatgtctagtattgtgacatgccaaaataaaactgtgatgagtgcccgctgaatgttgtctgaggataattcacattcctttcagctaaatttcagtttggcaagcgataatacaacatacagtcccttcgaagtgagggagaaatctagatggagcaggcaaggagagaagcacattatgaagcttagcagcggaattaaaatactattggctgatgatgaaccgcatattttacaatttctagagcttggattaagcaatgagggctttgatgtgcgcaccgcaccggatggtgcggctgcgcttgagttggcgcttgaattcaagccacatatggctattctggatgtcatgatgccagagatggatggattcgaagtggtcgagcgtctgcgtaagactggagccgaggttggcgtgattatgctgacagcgaaggacgaagtcgagaatcgggttaagggtctttggttaggtgctgacgattacatgatcaaaccctttgccttcgacgagctgctcgcccgaattcaggccagactgcgcaatcaatttcctttattaataggagccgtcacccacggtcccttccgaattgatgatcagcgcaaagaaatcacctatcagaatcaggtcttggagttatctcctaccgaatacgaactgttgaaatttattgtgcttaatcatggaattgtacttagcaaagcgaccattctgagccgggtttgggggtatgattttggcggggaagaaaatattgtggaggtatacgttcgctccttgcgcgacaaactcggggataaagagcataaactcattcgcacgcttcggggtgtcgggtacagggtggatctctgatgaactcgctgcctaagaaaaataaacttcgtataagacgtctccaccactggatatggcctcgttcactgcgttctcaattactctcacgttctttgttcgtgcttgctgggctgttattgttgatcggtattctgcaattctggatcatggaaagctttctctaccggaatcaggcaaaaaccatggaagaacagctcatgtccatgcccccggtttggctcggaatccagtcacgtaacggctcttccaacaatccttttggtggacaggcaggaaacgggtctgataatcgggtactttttattcctgaccgttcactggccctgtttgataaccaaggtacgttcgaggatatttttggagaagacggtctgaaagcccctcaactatcaaccgttgaatatcaggacattacagatgagttgaaagaacaaaaacacattccctaccggatcgtcacggatagccaagggaatgagcaattgattgtattcgcttcacccggtccacgcaatcgtggcttaccgatggtccagatgggtacggctacgaaaccactgagagatctcattatcaaacagcttctgatcttcctcatgttatcgctgttggccatggtagccggtctgattctatacactaaggtattacgccggacgctggttcccctgtccaatatggtgaataaagtacagcagatcgacgcaggtagcctcgcagaacgccttcccgtcgttcagggacaagaggaagtggatcagcttgcagtttcattcaatggcatgcttgaaaggctggagaactcgtttgaagcggagcgggaatcgaaagagcagatgcagcgtttcttgtctgatgcttctcatgagcttcgtaccccactcacctccattcacggcttcattgaagttctacaacggggtgcagcgaccaatcaagatcaattgtataaagcactggacagcatgcacggcgaatcggtacgaattaacaagctggttgaagatttgctgttactaaccaagctggatcaggctccaaagcaggagcgggaggtcattcagctagacagtctgctgctcgaaatgcaaccacaactcgccatgatggctcagcaaagatccattcatcttgatctgacggctgaagtgtatgtacttgctgacgcttacaaggtgaagcaggtggtgttgaatctgttccataatgcggtgcagcacaccgatcctgagcatggagccatctccataacgttatatgccacgtatcataaggctgaattgtcagtgaaggataacggcacaggcattgaacctgaacatctgccccatatctttgagcgattttaccgcacaagcagttctcgttcgcgcaaacaaggtggcgcaggtctcggtctcgccattacccgctcgattgtggagtcgcatggtgggaatattaccgtacaaagtcaggtaggcgtgggaactgaatttatgattttgctgccgctgcataagactgatgtctaggctgagcttcggctatacgtaagctaaaagttggctatacgtagctctaggtagatctacttgatcattacgcaagctctaggcgagctctccaaacgctgcttttcttccattttaattccggctttttattgcatgaagaatccccctctcatttcggttgaggaatgaaaaggggattctttttgtatccgatccgattgatagagtgtagagtagtagctcaattggtttcaggctttcgggctttcaggctaacgaatctgaggcgtcttattcaagcattttaagcgtccgcagagatctaatgaacctgagccacgttatattagaataaacagccgtttactgcgtttttctaaggggatttcgggaaatagcgtgtctgatgttccttacattttaagaaacgtacctaaaggccgaataagacgtcctatgttcgttagaaaatcgtctacccaatcgtcaggatcagccatcttggacctcaagacttttgagaccttggtatccatcatcgtatagcttgcctaaatttgaatatgagtttgagtttgaaggtacgctcttaaattcatcccgttctatcgctgtttttggcaacggtggattaccaagggtatacgccattttcatctaggaattctccgttatggcgtttaccatccgtcgcatagcgcacgataatcgcagcgccggcttcttttgatttgccgccttcggcattgccattaagatctgttgatgtgaatccgggcgttaccgcaaaaacttgagccctgctgtttttgacttcataagccatcgaaagtgtcatggcactgttggccgttttggatgaattatagtcgaaggcatttaaagtaaattccgcattttgcatatggtccagagaagccatgtcagttgatacattaatgattgtgccttcattatctttgattaatgggaacaatcgctgattcaaacggaaggtaccgaaaaagttcacttcaaaggcgttccgcagatcttcctcttttgtatccgtgaaggaatgagagaaagcacccggcatacccgcgttattgatcaaaaggtttattgtgggataagtattgtgaattgtatcggctgcctgctcaatgctcttcaagtcgcacatgtcgatctgtacaaattctacatctaaccccttggaagttaattctgaaacagctctttcaccccgttcaacactacgtgcgccgaggataactttccaacctgcttcacccaactgctttacgatttcatatccaattcctttatttgctccggttacaaagacagtctttttcatgcgaatccttctttccataatttgatttatatttaacaatgtataagttactatgctacacttagtgtaggtcaaattatttttataaaaagggggattaacatgttaacgattggagaagtagcaaaaaaagttgaactctccattggagcgatccgcttttatgaaagaaagggactgctgaaacctgctgcacgaaatgagcagaataaccgtctttatttggaggatgatctgaactggctggtttttatcaaatgccttcgcgaaaccgggatgagtgtggaagacatcaaaaaatattatgatcaggtcaacgaaggaacctccacgctgaaggaaagaaccaagctgattgaggatcaaaagcaaaagttgctgaatgatatagaggagaaaaaagcgcagcttgttcatttggataacaaactggagcgctattatcgaggagaaaattattaacagaaacctgtcctataaactaaatgacagaaaaaatcaggcagccagcattaactgtctaacctgatccgaaatattgaaacttatagcgattttcaatgaggttaaaagttcaatcaaatatgaccttcgcgcttacacagttgataatggttataggattcattctcgatctcgatcaaatttacccgttcaaaattacatttctgtatgaccttattggatgcttgattggtaatcaaagcgatggcattcagcagctcaatgttcgtatgttcaaataaataatccgtcattcctttgagtgcctgcgttgtgtaaccacgatttctgaaatgcttggaaataccatacataatctcccgattgggtgctggcagttcgtccttaatccctgagcaacaccatcctataaactcatcattttctttgagtacgatagccatacgtaagtataaatctccgatgtctcctcccgccaccacagcttgtttaaaacgctgattctcaggaatttcatattcggtgagccacaggctcctatcttcaatcgtagcgttccatcccggtaagaattcatacacctcaggttgccacgtaatttcttgcagtttcttcaaatcctcgagtcgatactcacgtaaataaatatccttgcaatcgatgattaattcatcagtttgtataggttggttcataaggttgcctccacattttaatttacattacatcattatagagccgtgtaccattgccttaaaggcaatgccttgatatgtatagcgtcagggtcttgggttttttcaagttggggaaaacactctggatattgagccaaatattcgctaacacaccatcgaaccgaccagttaatatctgttgaccattttatccaattatgtatttcctcctttggagcattttgcaataatccatgcatataccatccacgcactcctccttctgtttcatgcattaaatgcacccaatacaactttcgctcttgttcattcatcggttcgccgagggtcgatactgcaattttacgaacaatagcggatgaatctttcgtgaaactccataactcttcacgtgataattcgtccctctcaactaaaactgttaaagagagcgctctttcggtatcatcgattgaatgaattgcgctatagagattttgattttttatacttatcatgggtaaagttttttttatgtaccttggcttatctgccctgttcatataacgaattgtattctcaacattaattcgaggagccaggttatcattaccctcaagtggttctccatgctcgactaacaagtgtcttagcatctccgcacttagactcggaaattgggagaacaaatgggccgcaacaccagccacaagcgcagccgatccagaggtgcccccataaaaagatacgcgctgaccagaatcttcagtttcataagaggggattgtaaggtgtagtctgggcgctaatatatctggcctaaagtggccatctccatttctaccataaggttcatcagggtaaggaacgtgtaatgaacgatcggcctttccacgatcaacgtagcctcctactgctagatattgtattggaggcatgatgttatttaaacgtgtatttccattcgaacaaataaccaaaatgccctgttgcacagctgttgccaatgctttaaccgttgagttttcactcgtatttttaagatgaacttcattatctaatgcatgccaaccagtgcttaaaataatttttatattccattcgatcccatgttcaagaatccattctattccttttttcagacgttctccttctccagttgtaaatgcgccatgatctaaaacgattaatgttgctgctggtgcaatcccgacatgaatttgttcctctaacagaataggttcatgggctaaagccagtacactcataaggccatgttcacctttccgattatcctcctccctgttcatagatgaaatgtctcgcacagagatagtcatattttcatgtacggcaacacatttgattcgtgtatttaagtgatttacgagatgatgttgtttaattgaatcgataattacaatccccacacccagaccagaagtatgaaaatcaggttgttcagcaaaacctaaccttttccatgttggatcgggtattgctctatccacacgatcacctcagatttgatatcattagaatactctctcgccttccgcttaaagtacattatcattcatccaactaaaatcggcagatttcaagctctctggcgatcttatttatactagaatcatacaaggccctctttttctataaactcatctttggttaatccaaagaggatcatatcctggtattttccatcggtgtagatcacctggcgacgcacaccttcctgaatacatccaagttttctcatcatggctgcagaaggttcatttccttcgagtacagaatcattgaatttgttgagcctacgctcgaagaaggcatacttcagtaagattcgtacggctctggtcccgtatccttttcctctatgatccctgtcaatttgaatgccaatgctaaaggtaccgttcctttcatcaatgctgttcagattcacacctccgacattttcaccatccatatttacaattgtaaacatgatccgtcctttggctaaagaaaaatcagagaagttttccgtgaaactcttcgcttcaacatgggttggcggcaactctactgcacactctaataaccgacgggcgggtgtatcaaagcggttataataatgatcttcccaatcttcctcacgcaaagcacgcaatctaaccttgtcatcctgccagaaatattgactataatcgatctctctcattccaagtccccccgcatattcaaccagatttttacttcgagctacaaatataataacccataatgtggaattggaggagatttgttttcattaaacacaacgaaaataacccccgaacaggataaaacctgtcggaggctacgctctattttatatcaatatgtcattacgattcttccgtatattgaggtttggacacgttatccggaaccgtttcgtcaaaaacatcctgacctggataatcccgtacgtctccttcgtgaagctcatgattttcataatcaaaacgatgtgcagaccgctggtccactcgccacggagaacttttcccgagagactctgataacagagatgaaccgtaaggaccctccgggaattcttcgagtgtgatatcgtttcgctgcgactccaccgtagacacatcggtatattcttgccgttcttcacgcaaaaacttatctttcatcgtttatccctcctgatccacttcagatgaccaacgtccacttattgtgagcgaggacaaacgcatttatgcatgatctttggaaaacactgcgtttatggttctaatccatcgtcttattcatcaccggatccatcacgttaatcatcgccatcacaactagcgaatccatattaatagtacaaaaactatgaggccagccatgctaatccaggtatcacgtttggaccataccaataacgatgaacgtcctccgagcgtagagtgctctctaactttacgcatttccatcgcaatggtcatatcctctgcacgttggaacagtgccattaacaagggaatcaccatcggacccaggtcacgaattcgaacggtatttggtcttaaagccgcctttccacgtgcccgcacgatcagtgagaatcgctgccactcactccagatcatcgggataaaccgaaagattaacgatacagcaagagcaaacgaagctacaggcaacctgatctttttaccgataccgagtacccagttcaacccttctaccattcgcccataaggtgtcgtcaacgaaaaccaaaggcttgccaatgtgacgataaacaatcgatatacattcagcaaagtaccctccgcctgacccagggaaaaaccaaagtgcagaccgcctccctctgttgaaagggttgtcccagataacgccgttgagatgatgaaaaagaataataatggcttcattaacttcatacatccagccaaagtctgacgcgggagcacggcaagtgctgctactaccggcaccagtgttaacgtcaatcccagccatcgctgttgaagcatagctgcggtgactaacaaaatatacaaaatccatttcagacgcgggtccatgacgccatataatccgcctgaatgagtcaatgtgttcggaagaagctttggatcatcctcaattttaatggacgacagcatccgtgcttctttttcatccttcattgcatcgctcttgacttccagcgttaccgtccctgctacttctttcgattcggtttgaatctgtaactcaactgacttggactgaacaatactttcagccatctcttctgccgtcatcgcggtcaaaggcagctctagacccactgctcttaactgctgtgctagtctcatcgatggtggcagtccaatccctgtctgctccagcagttcaggtcttttgtgaagttctctcggcgtaagatcagcgattagacggccttcctgcaacaacaatactcgatccgcacaaggcaaaaatgtatccagatcatgggtcgctaccacacccccaccacctgccagacgatgttgctccaatacatccagcagaagcccgacactttgcgcttccaaccctgcgctcggctcatccagcagaagccagtgtggattggtcacacttccgagagcaagtccaagcctgcgcttctctcccccacttagagcaaatggcgacctgtccagatgaaaacgtcggcccaactccgaggatactggcgggtcccattggttcagtgcttttgtgatctgctcttgttgctgtttctctgaaagtcgatagggacgcagagaatatgagaattcacgctgaatacttcgggcaaacagttgttgttccggaaattgaaacaatagtcccgtttgcaataaaatcgactgcggcacttttccttctttccaaaaagaagtgtcatccaatgtgatacttcctgcatcgggcggtcttagaccagccaacgtctgtagtaaagtcgtttttcctgaacccgtacagcccagcaacaaggtgatttccccactgttcaactgtacactcacatcttcaagcagggcacgtttgcccgattctgatgcttctatacgtatatcggtcagctcaatctccaacgtgcgacctccttagccagttgctcgggtcgcagtggcatggcttctggcatcatacctttttgcttgagcaataacgcagtttttacagtaaaaggagggtccaaccctaaccgttcacagggagagagctgtacattttcccaagcagccttctcattcaactctgtttcatagaaaaaggactcaggcgccccgttgtacacacaacgtcccctctccatagcaatgattcgatcacacagggttgcttcctccagatggtgtgtaatccagatcaccgttgtaccccgctgggtaatcttctgaacgatggcctcgatacggtctcttgctcccggatcaagcatggctgttggctcatccagaatcaatatatccggtttggctgcgagtgctacagcaatattaagcagttgtttctgtccaccggataattgtgagacagccttctccgggggatattgaagtcctacggtatgtaatgcatcctgccggcgctccaattgctctcctacagaatccatcaatggtgacagcgcaaaatgaaactcctcttcaatcgtatcgccaagtacctgtgcatccggttgctgcaatacaccccgaacggtaagttcatccgagatatcccgtacccctccagatagtggaatgaatccaatcagtagtccagcgagtgtgctttttccactgccattcgcccctacaatactaatccattctccttggtgcagcgtaagtgagaccccatccagtgcttttctcacctgactaccttcggaagcataatgcactcgaacatcttctaatgtaattataggcaggttgccttgcatcgtaaattagtcctttccctttctattgttatgtggtacgatcctaatcgttaaccatatttatataattggttaacaatcatattaccaaaatggagaggattgttcaaacatgaaattatctttgcgaggcattgtattcagcgcacttatggccgcaattttagtactttttggttacataagcattcccattggcttctccccagtaccgataacattacaaactttggctgtcatgctggccggaggattacttggtccactctatggttttctaagtgtcacgatggttgttctgctcaccgctcttggattccccttgctacacgggaccggaggacttgcagtactgcttggacctaccggaggatatgtgatgatgtggccattctccgcattattgattggattgttgcttgcacgaatcaacatcaaaggtgtcacaggattcatgctcgcttttgttgtatttgaactatttggttcactgctcgtgtatgtatcgggcgtcccttggcttgcttatgcttacaaaatggacctacctgaggccatgattcaagggttttatccttacataattggggatctgatcaaagctgtatttgctgccatcatcattgcgcccgtgcgcatggttttcccacctcaacgcctcacaggtaacatgcattccacggttataaaagcggactcttaatagaagctccatatcctattagatcacaagcctccatattctaaaacaaaaacagccaaaatcactttggctgtttttgttacttctcttcctcgaaggttgttctgtcatcggagtgatccgtgtaaatcttctttagttcaacttatatattcacctgaattaattgacgctctgtaatctgaaattgttgatccgctgtattttcaataaacctctgatcatgagatacatacagaattgttccttcatacgccttaataaaacgctccaacgcttccaatgcatgcatatcaagaaaattcgtcggctcatccaacaatagaatgttatattgtccaagaaataagtgacataattgaagacgaatcgcttctcctccgcttaatgtcccaacattcttcagcaagtcattacctataaactgcatcgcatgcaacgcacttctgagctctgattcctcatattccgaacgatttttcaagaattgtaatacggtctcttttgtcgtaaaacgatagctcatttgctgaaaataaccgagctttgcttttggagacattgtgatctgatctcccacatggaaaacatggttaagcaatgtgcttttcccgctgccattggctccggttatcgctattttttgttttaatggaacctgaaaacttacatcctccagcaatacgttaccttccacttcgagtgtaaggcgatctgccataatcggaaatcgattgtgcagctccagtgtctttggctgacggaagatcataggccgatcctcttgcaccgcttttacctcgtgaagttgttgcatccgctgttcaatcgctttggctgcgcggtgcaccgctttttgactggtgcctttggatttggtttcaaccatacggtttgtttttgccttggattcttttttggacatgcttccagcctgcgtgattttctcggctttcttcatcttttcccgagcggccagctccaatcgtcttttctccttggaaaactgctcatgggcctggttttgttgttcacgctccagcctcttctgtgcctgataatcactatagttgccggaatatacgtgaacctcaccttgatggatttcccagatcgtggtcaccagttcatccagaaccgcacgatcatgactgatcagcacaagcgctccataataataacgcaattcatccagcaaaaatgtaatgcccgcttgatccaggtgtgttgttggttcatccagtaacagtacttcatgataatgagtgaacatttgagccagttttagacgggtctgttctccgccactccatggctgatcgtgttgaggtatcgctaatttactgagtaaagccccgtcaacttcgagattttcgttaggctggggaggttccacttgttccaaataaccaaactctgcaaaacgttttacctttccggctgttggctggatctgccccgcaatgagtttcaacaatgtacttttaccctgaccattaccacctactacaccaatgcgatccagttgatgcacagccagtcgctcaatgttcagtattactttatccatataggtcatctcaacctgttctaattcaaaacatatcttttccatattcgctacctccgaaataagatttatttcgtatcgatagcgaagcacgcttctatcgatacgagcttatcgtgccagctcgtatcaatagaacagtaacgtcatcatagcggttacctccagtagtctgtagtgagcgccttcacctaattatttaactgattaagataatcagaagaaaaacaaagaatcacaggccacggcctgtgattcaacgtaaacgggaaagcgagtataacacttattttaaggtcaggatgattgaaaatgacagactgatcccgtttactctgaaccaatagtcagagcctttgaacgtattcaattaccgattcaaaggaaggaagcgcagtctcattgcatgtgtcatgttcaataatccacctttcattttcatgtatagatatactaattataattttccaattccaccatgtcaacggaacgatgaaaacacttcaccatcagattagtacatcaatctacttttgttcctgaccattaccgctacttaatttcaatagaagttcctggctatgaatctgacccgtagcctgtggaatcacttcttcgtagttggctgagttcgttacgataataggcgttaccgtgtgatatcccgcagccttaatctgtgcaatatcgaactcaagcaacagatctcccgcttgaacccgatcgccttctttgatatgggaaacaaaatgctgaccgtccaatttaacggtatccacgccaacgtgaaccaatatttcagcaccggtgtctgacactacagccaaggcatgttttttcttgaatgcaacggtaactgtaccatcaaaaggtgctacaactctgcctacagttggctcaatcgcaatccctttacccattgctcccgatgcaaaggccggatctggaacttccgacaattcaacaatcgttccttcgattgggctaaatacattttcgtctgaagcattcgttgcacgaacaggttgctgagcggatgtcgtagattcggtttttgtttcttcttcgaccggatctttgaagcccatgatgtacgtcagtacagccgaaacaacaaacgatactacgatacccagaatcaatcctgggaaaccttgtccacctggtccgtagaagattggcaaggtcagcaaccctggtgcaccggatgcaaatgccaatgtgcccgcttgaccaatgatagctccaccaactgcaccaccgattacccctgcaatgaatggacgtttcagtggtaatgttaccccatagatggccggttccgtaataccgaataatgcggtcaacgtggatgatccagccagcgttttcagttttttgttcttggttttcaacataaccccaaaagcagcacccgtttgggcaaagatcgaagctgtcgcagccggtttaacgccatcctgtccatacactgcaacgttgttgataaataccggaatcagaccccagtgtattccgaagataacgagcagctgccagcttgcacccataacggctcctgcgagcaatggactgaatccaaatgcggcaaccagtccagctgcaattccattaccaacgtatacgccaaatggtccgaatacaagcaatgtcagtggtaccataatcactagcaaaaacaatggcgtaacaaagtttttcacactatcgtgaagtgttttattaaagaacttctccaacttgctcatgacaatgacagctaaaatgatagggataactgtagatgaatagttcatcaaaatgacagggataccgaagaaatccgttggtgttccctctgatttcaacgtgacgatggacggatagatcagtgctcctgcaatcgtcatcgcaacaaacatattcccctggaatttacgtgctgttgtaaccgctaacaagagaggcaggaaatagaagagactatctgctgctgcatacaggatcgtatatgttgtttctgtcgtttccagccatccaatattgcttgcaatcaacaataacccttttagaataccggctcccgccataacacccagaagtggtgcaaagatgctggatatgatatcgataatccccccgagccctttggctgctttgcgaggtttttctttatctgacgaatcgtccagaatgttactgatctgtccaatggcactatagacttcaggcaccttgttaccaacaaccacctggaactgtcctccattttctttgactgcgatgataccttctgttttctccagtttggctttgtctgccttggcatcgtccttcaatacaaaccgtaatcgtgttgcacaatgaaccagcgattccacatttttctcaccgccaaccagttctacaatctctttggccagtttctcttgactcatgatctgcacccccactttttctcaaacaggccctttaccgatttttttgcacgcaaaaaacctaagccttgagcaaggggacacaatggtcctgtccttctcatgacttaggttttgcctgcataaccagtaacaatcccagttaaatcgtattcaattcctgttaatcacatattattataataaaaccatttttgtcaacatttaaatattatcgattaaccactcgttcgatatgaaccgtgagatacaacttttcttcattggtcagctcatggttgtactcttttttgacaaacaactcaattttctccgtgcacgctgcggcatccggatgtttctccttaatcatgtcatagaaatgatcatagttgttgccgtaatgcgtaccactgagcacacgctgggagaagaacttcagatgtgtgataaagcgaaaataactgagagagtcctcatcaaattccattttgaaatgatatttcgctatattaataatctgctggataaacttcgtaatattcatcgttgtaataacttcttcgttcatctctgcgttgacaatatgaagggcaataaaagcggcttcatcgggtggaagctcaatattcattcgggtgttgatctgttccagcgtcctcaatcccagttcgaattcggacttgtacaactgtttgatctcccacattaatgcgttcttgatctccacgccttcccgataacgttcgatggcgaagttaatatgatccgtaagagatacatagatgttctcattcaactttcggcccagattctcacgcgcatacgtgataatctcttccacaatttcaatcagttccatcggaacttcccgcagtagcattttgaaattatcggaagtttgtttgtttttcaatgcaaatactttctggatgcgggtctcgtctactttatcccccggctttttcttaaaggcaatcccacgtcccatcaccacaagctctgctccatccgcctgatagatgctaatgacgttattgttgataacctttgctattttcacttcaatccccccgtcacgttccactctcttggcagttatacatcgtcttttgggcatacaaaaaaaacctgaagcatcacaaaataaacaagacatggtggtctgctttttttggtgcttaggttttgcctacttcgagtagtaacaatcccagaaacgatataattgcgtcaagtatagcgcgaacctgactatatgtcaacgctttcaatgcaggaacaatcggaagtcccatggttatataaattgaactagataatatttacactagctactccgatgacagaacaaccttccgatcgctgttatccccagattttttctgtcctctccgttttgtgtaaatgtttagttcaatgtatatagatgaaacttccgatgttttattgccgtacaagaccattttaattcagaaaaatataaactacgcgtcacccaggtttgttccgttggattcgatcacatttttgtaccactcaaaactcttcttcttcagccgcgtcaactcaccttgaccttcattattacgatccacataaatgtagccataacgttttctcatctcacctgaggaggcacttacaatatcaataggtccccagctggtgtaaccgatgatgttcaccccatcctgaatggcctcacccatttcagctacatgtcgtttcaagtagtcaatccggtacgcatcatccacttcaccttccggtgtaacctcgtcattggcaccaaatccattctcaacaacaaacagaggcttctgataacgatcatgtagttgattggcggtaatacggaatcctttgggatcaatcgtccagccccactcggacttcgccagatatggattggctaccgagccaaatacattaccactggtcatatttttgataacttccggatcggtactagttgtacgacttgaataataactgaatccgatataatctacggtatgattcttcaagatttccgcatcacccggctgcataacaatgttcaactcgtgatctttgaagaaacgtttggcataacccggatattccccacgtgactgcacatcgatgaagaaataggactctctatctttttccatgccctggaacacatcttccggattacaagtatacggatagaagcttcctgcggcgagcatacacccaatcatggcaccaggaataatctcatgacatgccttgactgccagtgcacttgcaaccagttggtggtgagcagcctgatattgaatttccttgatgttatccccttcattaaacgccagccccgccccaaggaacggaagatgtaacagcatgttgatctcattaaatgtcatccagtatttcaccttgtctttgtaccgagtgaataccgttgtagcgtaagtctcgaaaagagttaccagttcacgacttctccagctgccatacttctcgatcagatgcacaggcacatcgaagtgagctaatgtaactacaggttcaatgccgtttttcaacaattcatcaaacaggttatcgtaaaattgtaatccggcttcatttggctgtgcatcttctcctgtcgggaaaatccgtgcccaggcaatggagacacgcagtgctttgaatcccatttctgcaaatagagcaatgtcttcatggtaacggtgatagaaatcgattgcttcgtgcgaaggatagaactcggtagccagtggcgtaaaggccggaacattacctttcataatacttctgcggttctctccagtcggcagcaagtcaacgatactcagccctttgccatcttccagatacgcgccctccgcctgattggcagcaatggctccaccccacagaaaatctttaggaaatttaaaattcgtcatcatcattctccttccaaatatgtaattcagctacccgctccaatcgttagaatattaaaaagacaaaatagaaaaaacccgaaccagcctgggtacacgattacgtgtaaacaagccagctcaggttatgcccatatcggtaacattcccagatcatgattatgcggattggataaaactttagcaagaatcagaacagttgtcaacttcttgaaaccggtttagattcggattgcccgctatgatatttgatagaacgcagcacatgtgccgccaagaatcatctgttgatctagtataggtaaggcattaatgtgagaattaataagaccgtatacttcagaatacgtagctgaaacgttgctcacgggccagtcggacccgaacattaacctttgcgcaccaaaggcttctatggcgatattcagataggctgtaaaatcctttggagtccaatttgcccagtctgcttccgtcaccatccctgaaagtttacagtacgcattaggttgtgcggccaatgactcaagcgcttctttccacggtgagagtatacctgattttatgtcgggtttggctagatgatcaagtacaaatcgctgttcaggaaacgccttaaccagttcaacggcataaggcagttgctccttggataccaacagatcataggccaaatcatactcttttagcaatgaaattccgcgctgaaagtcttctctcaatacatacttcagatcaggttcatcctgtatgacatgacgtacgcccttcagatacggattggacgcgaacagttcaagctgattccgaacttcatccgaacaaaggtccacccatccgacaacacctttgatacattcatgccgttctgccagctgcagaagccactcggtttctgtcagtgattgtctggcttgtaccgcaatacatccctccagtccggattggatcaataaaggttcaagatcttccggaagaaaagattgacgaatgactttcatctcttctccaatccatccgtactcggcgacgttgtattcccaaaaatgttgatgtgcatccagcttcatattagatccctcccagggtatttaaatctaattatcattcaaaagcaaccatatgattttcatttccaatgaaataaacgctcactacacaatctattaatatgacaaaatcactgatttttacatgatttttattccaattgtgaaggtattgtccaatattaaatcatgatatagtaaattacgaaaacgctttcagtacataaatcggtggtgattctagtattaaagaagtgaatttttgtttgcgttgagctctatttccaccctgcttaaccgctattcacgtttaaccattctctattcgaaggagactatattaatgaaaaaaaaccgcaaatcagtcctttctcttacgcttgtgactgccatgattctatctctattctcctcggctatggcttcagctgcaactgacaacagcgaacaggccaatgcatcacccgctccaagcaaaatgcagacctatgtaaacgccatggagcctggctggaatctgggtaactctctggacgccgttggtgaagatgaaactgcctggggcaacccacgcattacgaaggaactaattcagtcgatcgcagatgagggctacaacagtatccgtattcctgtaacctgggaagcccatatcggtgacgcacccgactacacaattgattccgcttacatgaatcgggttcaagaagtagtaaactgggcccttgatgcggatctctacgtcatggtcaatcttcaccatgattcctggcgctggatcagttacatggagaaagaccatgacaacgtgcttgcacgttataactctgcttggactcagattgcggacaaattcaaagatgcatccgataaactcatgttcgaaagtgttaacgaaccacgtttctccgaaggcggcacaacagatgcagcgattggatatcgcatgctggacgaattgaatacttcttttcacaagatcgtaagaacttcgggtggaaacaacgagacacgtcctcttgtacttccaacgatgcatacctcttccgctcaacctgatctggatgaactgaataagaccattcaaaaattgaatgacaccaatattattgcaaccgttcactactacgggttctggccattcagtgtgaacatcgcaggttacaccaagtataacgaggaagtacagaaggacgttaccgacacatttgatcgagtatacaatgcttttacagcgaaaggcattccggttatcgtcggtgagtatggcttgcttgggtttgaccaacacacaggtgtcattgagcaaggcgaaaaactgaaattcttcgaatttgttggacaatatctgcgtcaaaaacagatgacaacgatgttgtgggataacggtcaacacttcggtcgcacaagttttacttggtctgatcaggaattatttgataccatgaaagccagctggacaggtcgctcatccacagccgaaacggatctcgtatatcttaaacaaaatgaagccattcaagataagaaggtaaaactcaatctgaatgggaacaaattcaattcgttgaaaaatggcactacccctcttgtaagaggtaaagactatacgatcaaaaaagatgtgcttacgttaaaatccaatctgttaaccaaattgacaacctctggtgatttgggtgtaaatgctacactcacagctggattcaaccaaggtgctgactggaactttaatatcattaaatatgacacacctaagttgaacgatgcaacaggtacaaccagtgcatttgccattccgactacgtttaacgggaaccaactggcaacgatggaagcaacatatgcaaacggagagaacgccggtccacagaactggacttcgttcaaagaattctcctacacatttagtccagattacgaacgtaatgtgattgaactgaaacctaacttcttcaatgaaaccaatgatggcgaagtcacgcttaagttccatttctggaacggagatgtgctgacgtacaaaatcacgaaaaatggaacaagcgttgttggcgtaacttcataatagttataaggattccccacttgatctatacctgtggtaatcacgaaaacgttctgtccagagccatcggttcgaacagaacgtttttccttttaatcagataatccgtatccattatgaatgaccgttcacaataaaaaggaaacatccccactctggctatgaatgacatacgttgcaccaagccctttatatacaagaccaactggagccttgttactggaaacgacatagagatgttgcggataccagctgtcacacaactggatatcctggcaacattgaggcagattgttctcgaacacaaatgcattggtgaccatatattcgggtcgagtctgttgcatcccttccgtttcttgaatataacgaacaggaaatgctccaagggtttgaagttgttcccgttcctcttcactgtgtacaagcacaacgaaggctaatccctttttcagtaataaatccacgaaattcatccccgctacactgtgtcctgctgatacaacaatcattgcttcatccattgctgtctacctcgccttcacatcagatcctgcatatatcatctcaagtacgttatgtgcgaatcatagtcctctgtctgcctttccgcaattgaaccgtatccgattcagaaccttcctgattgattccagaccatattcctctttatatcctatgtaatctgccctttacgctctggatctccttatatctccgttaatcataagcgattaaagaaatctgattaaccgagccttaatcgaagatatatctctttttgatcgcttacatgcacagattcaaagcaaaatgtcttaatactttggctaaaagtaatgcaaaaagacaaaggaaacctgatgatacatcagttcctttgccttgtatgatttgtatttctctacatccatgttccagtacatttctatttcaaacgatcacttattgaggttctttgaatttcactactagcaccgcttccccattggcttgaacatgacctgttgaggctgctgtaacagttgctatggtttcgtttccactagggatcaacacaggtgtaatcaaaggcagacccgcagactgaatgacatccatgtcaaattcaatcaacaattgacctgcagttacacgatctccgctattcacatgcgcggtaaaaccgtttcctttcagtccaaccgtattaattccgatatgaaccaacatctgtacacctgtctcatgctccagaatcaccgcatgtttactcttgttcatgacatgtgcgatgactccatcaaacggtgcgtacacttttccttctgatggctcaatggcaatgccttcacccatgtgtttttccgagaacgccgggtcaggaacctgctccagagcaacgacagtaccgttcattggcgaagctatttcgagaaaatctaccttaggacgattgcttgtaacggcttcggtaactgaattaatacgcggattagattcatctgctttaacttcagttgatgttactccactgttgtcatggctcaccgattcttctgcgaccggttgatccttatatccgaagaaccaggtaagtgcaaatgcaatcgccatggcaactacgttggacaagatatacaacggcaattggctgttcagatagagcagtgtaccaggaataaccgttacagccatgcccgtaccttgcagatggaacagggaagcgatgaaaccacccacaccaccaccaaccagacccataataaatggtttcatataacgcaagttaactccgaagatcgctggctccgtaatgcccagaaatgcggacaaggaagaaggtaatgcgagtgctttgagtttcatatttttggtcttcagaccgactgcgagacaagccgctccttgtgctgccatggcacaggtaatgatggcgttgaacggattgaatcccgttttctccagtagctgaatctccaggaaattaaagatgtgatgtacaccggtaacgacaataatctgatggaagaatccaatgataatacctgcgatgccaaacggaagatccaatacggcagttgttccatgcagcacccactcttctagggaatggaatacgggaccaatcgcgaatagtccaagcgtaatcataaccgttaacgtaataaaaggagtcagaattaagtccagtgcctcaggcacccgtcttcttagtaccttctcaaacttggctccaatcaaacctacaaagaacgcgggcagaaccgatccctgataacccacgacaggtataaaaccgaacatatgcagcggctgtgctgatccatctgccaccgcgtaagcattgggtaatgcgggattgaccagcattagccccagtacaataccaagtaccggacttccgccaaatacgcggaatgcggaccacgctactagtgcaggcaggaatgcaaaagccgtatccgtcaggatttgagtgaacaacaggaagttggccgagatatcatccggtgttgcaccgaacaacgccagaatttcattctgtgtaagtaatccgcgcaaccccatgaacagtcctgtagctaccagaacgggaatgatgggtacaaatacgtcaccaaacgtgcggatagcccgttgaaaagcatttccttcttttttcccctggctcttcacatcatccttggacgttccttcgatgcccagcttctcaacctcttcaaagattcgattcactgttcccgtaccaaagataatctgatattgacctgagttgaaaaaggcacctttcaccttctcgatgttctcgaccgttttctgatcaatcttttctttatctttcaccatgatgcgaagacgtgttgcacaatgtgcaaatgatgcgatattctctttgcccccgatggcatgaatgacttcctgggcaatccgttgattctccgacatgttatctcattcctctcacgtaatacttaataatgccattgagttgcttcaaaatcagctttgcctccgcgtgtaaagaaacgaatgtccacgctgtcccggcttgggaaaatcctgctggtaaagacctcttccccatcgttcacaaagacctcgactgaagatgcatctacgaacagatggaacttaatcacttccacagtaagtgtgcactgtcgtacaacgccattctgctctgccagctcggtaccagacatcgtccgatccaagacaactttttgctgaatccgatcatacagaagaaccgttttttcagttccatttgcccggaattcgatgcctacaacctctgcttctacatggcttatctcacatatcagctcataggcaatcccattaagaccagtgaaagatcgactctcattgtcaattgttgcgcgaatatgtgtcccttcctcctgctgacgtaattggaccatctctgcaaccggttgttgaattaacttgccgtctctcagtgacaattgccgaggaatggtcaggcaatgagcccagccactatcgtctgttggatattccagatcgggaagtcccatccaaccaaccagaatacgtcttccgtccgggccctgcatcgtctgcggcgcatagaagtcgaatccacgatccaactcctgaaattcaccatgattgaactctctcgtctggagattgagcggctcaccgatcagataaccggattgaaaaatattctgataatgatctcccgctgcatctaagccttgcggggaaaagacaagtacacctttcccgtccatctccatataatccgggcactcccacatgtaaccaaaggaggttaattgcgtacgaatttcaccaaggaactcccagttgttcagatcaatggagcgatacagcactgtacatcccgtctcgtctgttctctgcgcaccaattacacaataatacgtgtctccttgtttccacaccttgggatctctgaagtgttccgtgtatccggctggcacagacgagatcacgggatcattcagtttggttactgaaccgctttcatccataactgccaagcattgatacggatgtctgacccaatcctcatctctggtattgcccgtgtacagcaagtgcagcttgccgtctttttcaattgcgctaccggaataagctccgtgtgagtcatacctgccacccggttcgattccaatcccgacattttcccagttcaccagattcttcgagcgggtatgataccagtatttcatgccatgttctgtcccaagtggaaaccactgatagaacagatgataatagccttgataatatgcaaagccgttaggatcattaagtagacctgttatcggctgaatgtgataactttgtctccaaggacatacggatatctgtgcttcaagcttcgcaatctctccaggctctgcttgctcaattcgtctgtagcgttgctctctagtcattttcatagttgttctccattcaaaatataggaaccggttccaataggcacaaaaaaataattccatatggcattagtgccttcccgtgttcgcatatccgcattggatattcataatggaaccggttcgatggaattatcataaaggatgtttttatactttgtcaacgctttctcgaggaattagttctacgtccagtgttgttcgttcctccaccgactcgcctttgaccagacgaataatgtgatttgccgctactttgcccgcctgcaaataatgatatctcacagtcgtcagcgcgggatgaatcatctccgtaatatcatatccgccaaatccggtaacagacaaatcttgcggtatgcggattttattggagaacgctatcttcatcacacccagtgcgatattatccgtggcccccacgatgatcgttggtgtgatctctttcagtatggcttcagcggtaacgatggcttcagacatcttaaagcttgtctcataatacttcacttcacatccaccacactcggcgattgctcgctggaacccttgtttacgatagattcctaccgcccgatccttctcgctaactcccatatacacgatcttgcggtgaccctgttcgacgacatatctgcccatctcataacctgcctgatcatcattgtgaaccagactgtgcaattgctcatgctgctgccctaccaataacaccggaatccgtatatcctcaacggccttcagatgtgcttcggtcacttcagcagccagcagaataatacccgataccttctgtcgtgcaaaatcatagatagcatcaatctcgcgctgcatgtcctgactcgtgtttgcgatcagcatctgatactgattactccgcagttcttcatcaattccgatcaatgtctgtgatgttgcaaaagaatcaagacgtggcacaaccgtaccgatgatactggtcttcttagccttcagactctgtgcaaatgtattgggaacataattgtattgtttgataatgcgctcaatcttctggcgtgtatcctcactaaccgatccgccattcaggaagcgagagaccgtgctttttgccacacctgccatctgagcgatatcagaaatcgttttattcataaagactcctcttgtttctgttagctatataaattgaactcaagaatattcacacttaccactccgatgacagaacaaccttccgatcgctgttatccccagatgttttgatttactttttcaaaggtgaacatccggagataaaggcgcacgctccgcttcttcaggttctttctgtcctctacgttctcgtgtgaatgtttagttcaattcatatagtttaccttttattatacttcgaatcgcaaatccatggcgaatttgattcaactccatttatcgcacgtctattgtacttttcgatgtaacagcaatagcccgatatcaatgtgatgttcataccgaagtatgatccgacattcatcaggctgttaaacttccatatacacgtttgcacagatcactaacataagaacgctcgccctacagtctcaaacctcaataataataggcaagatcataggtcttcgcttcgtttgagcgtaaatatagtgaccgatctcatctttcagctttcttttgatcacattccactgattcaccccagccccggtcaactcatccatccggtttagaacaagctcatggatctcatgcatgaattcttccgaatccttaacaaatacaaaccctctggagataatttcgggtgacgtgaccatctgtttttccgttttgctcagtgtagtcacaatcaccagcatgccatcggaggacagttgcctgcggtcgcgaagtacaatattgccgacatcacccatgatcagaccgtctacgagactatttcctgatgcaattttgggacccagcgaagcaatgccgtctttgtactggaccatatccccattattcacgataaacacatgatcacgctctatacctacgaattcagcaagcagtctgtgttgatacaacatgcgaaactcaccgtggatcggaatcagataatccggtttcatcagggtaagcatcaatttgagttcttcctgactgccgtgtccggacacatgcatcccagcagcaccacttgaaccatatatcacacgtgctccgagaacatacaggttatcaattacatgtgcaagatttcgttcattgcccggaatggctccggcagcaataatgaccgtgtccccggcgttaattcttacgtgaggatgtttaccggatgccaaacgtgacaatgctgccatcgcttctccctggctaccggtgcataatacaacaacttgttctggtggaaactgatccgaatcgatagcttcaatcaacaatccgtcaggaacttgcaaataccccaattcactggccaccgataccacattcaccatacttctgcccaacagtgccagtttgcgccccgtctcgaatgctgcattcacaatctgctgtaccctgctgacattcgacgcaaaggtcgagataaatactttttgttttgcacggataaaggcatccagaatgtggtctcccacaacacgctcagaaggtgtaaatccgggtctttctgcattggtactctcggagagcaaaatatggacaccctgtttgccaatctcggccatacggtgcaaatctgggaaaggtccatgtacaggcgacatatcaaatttgaaatctccggtatgcacaacattgcctgctggggtctgaaaaaagataccaagacaatccggtatactatgactggttgcaaaaaaggaaacctcgatccctcccagcttaatgctggaatgcgcatcgatcgtatgcaggtccgccttgcgcagcagcccatgctctttcagtttaagttcgatcagcccacgcgtgagcctggatgcatacaccgggatgttcatttgttttaacaaatagggaatgccaccaatgtgatcttcatgtccatgggtaaccacaagaccccttactttatccagattctccagcaaatacgctacatccggaatgatcagatcaataccaggcaatgtctcatcgggaaacttcgaaccacagtcaatcacgatgatgtcctgattgtactggatgaaatacatattcttccctatttcattcacgccgccaagtgcagcgatatacagtttgttgtgggctagattcaactctattattcctcctctgcgtggcaatcgtatacgatacggatctatattcctagtatggaagcaatcgcctcagttatgcatttcagcgtgattatgccaaaaaaaccaccacggaattttcattccatagtggtttatacgaaaaataaatgcggttacaccaatgatttatcacgctgtagtaatacgtcttgttcataggttttgatatcggtgatccacttttcacgaactggaacgccttgctgagcacaatagtagtcccagatcgacccaaacggataggatttgaactcttccgttaaggcaagacgcaacgtgtaatccccttccaattcggcttgtttcaaggcatccactggttcgagcatcgctcggagaagggctttgatcgtgttgcgagtccccacaacccatgcagctacacggttaatgcttgcatcaaagaaatccaatccaatatgtgtggtcgcaagcagatcatgtcgaaccagttcacgggcaatttccagcaactcatcgtccataattaccacatggtcactatcccaacgcatcgggcggcttacgtgaagcagaatgccacttgtaaacaaagacaaggacgacagtttattagaaataacctctgttggatggaaatgacccgcatccaggcagattaacgtatcattttgcaaaccgtaacccatatagaattcatgagaacccaccacatatgcttccgaaccgagaccaaacagcttactctctaccgcgtccaggttgtgctccgggttaagtggttcgccgaatacttcatccagcgattctttgagacgtttgcgtggtgtcaaccgatcaaccggattatccttgaatccgtccggtacccatacattggttacacaagtctgaccaagctgttccccgaaataagcaccaatccggcgggatgccttgcagtgatcaatccagaacttgcgaatttcaggatctggatgactgagcgtgaacccgtcacttgatttttcatgggaaaaacatgttgggttgaaatccagaccgagtccttgttctttggcccattttacccagttctcataatgctttggctcaatctgatccagttcaacctgctcgtctgtatccgtgtagatcgcgtgtagattgaccttatgtttgccaggaatcagagcaaaagcttgctccagatcgttacgaagttctgcaggggttgtcgcagcccccggatactgacctgtaacggaaatgccccctgttagctctccatctttgttcagaaaacctttaacatcgtcgccttgccagcagtgtacggatactttgatctccgcgagtttgttcagtacctcgtccgtatcaattccgtgctgggcatacaatgccttggctgcttcatacgcttgcttgacttggttatccatccgcaaaaaccctcctattttaacgtgtaaatgctgccggtacaccgccatcaatggtcatcatacaaccggttgttttttcggatttcgaagaagcaaagaatgcaattccttccgcaatatctcttggatagatattcacgagcaaagtcgtccgtttacgataatactcttccaattgatccggttcaatcccgtatgccgctgctcgttcatttctccaggaaccgttccagatcgctgaaccctgtagaatggcatctggaagaatcgtgttgacacgaatgccatactctccaccttctgctgcaatacaacgtgccagatgtgcttccagcgctttcgctgaactgtaagccgaggcacttttacctgcatacaccgagttcttggacccgataaataccatgcttcccccaataccctgctgtttcatcagcttgaacgcttcacgagccacgaggaaataccctgtacccagaacattcatattcaggttccattctttcagggacgtttcgtcaaatgggctggatgtcgccaatccggcattgttgacgatgatatccactccgccatattgcacagcaacatctgcataagcagattgaacggcttcctcatcggttacgtccattttcagcgcataagcacgattcgcaccgtactgatcattaatttcctgtgctactttctgtgcgccctccaggttgagatcagcaagcaccacatgtgcgccttcagataccaatctgcgtgctgtttcacttccgatcccgcctgctccacctgtgataaacgccactttacgggagaattcggtttctgccggagccagagacaatttgtacaactccagcggccagtactccacattgtaagattcatttgcactgagtgatacgaattgacccaggctagtagctccacgcataactgcaatggctctgtgatacaacgctccgcttacttgggaaagcgcccagctcttgcctgtgttgatcatgcctacacctggaatgaggataacgcgtggtgccgcttcgaacatgacgtcaccttcgtttttgttgctctcaaaatactgctgatattgctctttgtaggctgccacaccttctaccagcttggtttttaaaccttcaatatcttccgcatccggtgtccaatcgatgaacagaggtacgactttggtatgtaccagatgatccgggcaagctgcacccacctgagacaattccggggaatctgctccgcccacaaaagcaagtacgtcctcttgatcgtcaaaggacaaaatcatttttttgctatccgataccgctccacgaattgttggcattacacgtgatacgatctgacgacgaacctctgttgcaagtgccgggtgtttcacaccaccaaacaaactttcttcgttcacccgtgcttcgatgaatgcttctgcttcgttgataatcttgatcgtttgtgcgtaacattcctcggatgtttctccccaagtcacaagtccgtgtttttccatcagtacgagttcggcattaggattcgagaatacgctttcagcaatcattttagataacgtaaaccctggacgtacataaggcacccacacaaatcgatcaccgtagatctctttcgccaattccttgccgttatgcgcacaacacaggctgataatcgcatccgggtgcgtatgatccacatgtttatatggaaggaatgcatgcagcagagtctcgatagaggcacgtgggtgctttgcatcaatcatgcaatgtcccagatattcaaccatctcttcatccgacatggattcacgttcaattaatggtcgaatgtcttcgagcccaagtccggtaaaatgtttcgcttccatggaacccagatcagagccgcttcccttcacatacattacttctacatcacgaccacgaaaatccttcactgtcgttttggtagacgtattgccaccgtagatgttacatacactgcgatcagttccaatcagattcgatcggtaaaccaactgctcaagtcctgttgttttctcagatgcctgcgatgcattccataaactctgtaccatttgtttccctccgataatgtttgttttattcctaatccgagtttaacatctttgttttattttgaaaacaaaatattttaaaaccaaacggaaatattcaaaagtcattatagattgaactattttattaaaaaaacaccctgacgtaaccgtcagagtgttcctgtttcatcggtggattagaaaatccccgctttttgggaagtgtttttaataccataggtatcattaactacggtgttgccaaagctcgttaaacttccgttcggacctgtggccatgtccagatagttcagaccagaactgtttccataccaggaccaggccagccagcccacccctttttcctgaccatatctcatgatggcatactcgtccacatcaccgtttgtgtgatatcccccgaattcaccaatgatcagagccaatcctttgttcagcacattctccatattggctttgacggttgcagcatctttgccagcatactcatacatatgaatggagaagacggtatttttttgagaatcggctgcaaatacactttgtccataatccacgatggattgagggaactgcccccatccggctgcatccacaatgagcgtatttttaattcccgcatttcggagtttcggaatggcttttttgtaaccatcagcccacgcacttccattccacgttccataccattcattggcgatgttgacgattactcgatcttctttgccaatcaaagcttccttaatactaatccagtagttcactgccgcatccaacgaattatagtcatctttccctgtggcgtcatgtacttcgagtacagctatcattttattttggttaaccacattaataatatttttaacagcgttcagatcatctttgttgtacaggctaccattcgaaagaacaatacgtaccgtattggcacctgttttggcgattgcagggatagtggtattcaaatcatttttgaaccaggaatgtccgtgattaacacctctcatgacaaaagccttgcctgtggaatcgtacaacttgttaccgcttacataaaaacctgtagcagcagatgctttgggggctgcactccctaatgccatgaacatgagagcagcaataaccgtgaagatggtacactttttcagattaaccattcgtttggaacctcctgtatttgtttttttatttcaattaaccctgctctaggcaaaaagttaactaaaatcgttggtaatagaagtttttttattattaaataaataataattaactttatctaagttgcgttatttagtttaaataaactttatcgttaaggttatgaagttataataaattgaaaacgcttaccagtcaagatctttttactatgattaggaatcatttgtttttacataatacagcaaaaaaaaggttctctcccctcacaatcgttcggagaaagaaccctctgtattattaactaaagttaactcttgtttaaatcttgtttatctgttattttgtttaactcctgatttagactaagtgtcttctctaactcccgccaataccaaaccaacccgatactgtggtctcacccgaatttcattaaactttccaatctccacgccctcaaaccgctccacataagcctgattcacataactctcagtcgtcccttttcgaattggggttatagacagacgaagcgcgtgatcagccaacaaatgacgggattgcttcaaaccaagcatccagctgtgtccatagtgaatatgatccgttaacatctgatgatgaatatgtgctgctgcaacgtctccttcataatcaatctcaatccacacgtcatctacttgttccggccatgctgtgtccaatctcagtgttgctgcatactctttcgggtaatcaacctctacagcaggctcgtaaggcgaaacttggaatgtatacgtaccgaatattccctgcttcgactgggatgacgcagcatatttagaagctgaaacatgctctggagccggatagaaggatacctccatctctggttgctccatgtatgtacatatgagcatctcattctgtacatacagatgactgctgctaattacaagcctttcttctccgcccacacggaaacggtaggcatgtaatgcctcttcacgggtcaatgtaatgattcgtatgattataccgtccgatgttgtgattcgcagatgatggtccttgccggcaatcggatgtatcacaacttcattcccctgctctgatactgtaccttcaggcatatccacatttgtaacagatgttgcatcaacaacatactcaggcgccataccttcatgggcataaaagacagccgtaagctcctgatttaccataaatcgggtcagtggctgaacggtagcactaatgatcttcattccattcagattcatatggaaaggcagaatggctgccatgccggatttcagctgcatcgttccttctcttggataagaagcagtccctttgctggtatgcagctccaattggatatcacgatcaggcatcgccacatgatcctgataattattcatgaacagaaatccagaaccatcttgttgccgaacagaccaacgcagatccaacgtgttctccggggttatagattgttgaccatccggtataacacagcccattggtgcaagcaactcaccgtatgcttccaggaacatggacaagcttcgaatgcggtcatacgattcaccaacacgtccaaattccccgagtggcgattggtaatcatacgtcattttcggcaatgcctgctcgttcatatatgaatttttgcctatcggattggtccccccgtgatacatataatatccgactagattactgccattcgccagcttcacaatggtcatcgcctcgacactgtccgcatcaacaaccggccgagcgtgataactgacctgcatgccaccagcaagctcgcagtacgcagcggggtactccagactgtcataatccacttcttccacaggattcatatgcagatcccggaataaatactcccggcttggaggctgattgagaatccatggtgtgtatgcataccccgcgagcatcggcaacgttccttcttcaggcacgacagcattgccccaggccgtggcagtatagaacatcggcttcataccgacttcttcggcaatatggccaagcatcttcagatgttctcgtccatcccggccggaggtaatgtatttttcgcgggtatacccccatgcatccatgggtgcgccagcgtgcatatactcattttccaactgtaccccgataacagggccaccctcctgataaaagcagccgttgagctgacgggcaatctcccgatataatcgcttggcgtaatacagatacccatcatcgttcgacctgacttcgaatggataactgaataaccaatccggcattccaccattacgcacttccccatgacagaatggaccaatccgcacgatcagcggcagctcatgtttgccacagagatccacaaagtgccgcaaattcagatttcctgaccaattaaattcgccttcctgctcctcgtgaaaattccagaaaacataggaagcgacaatgctcaccccgcctgccttcatcttcagtaattcttcttcccactgcaagtaagcgaatctggagaaatgaaactcacctaccacgggaatatggggtttagcattacgagtcatataatagtttgtaaaatcatacgattcccctcgtggacttttgccgccactgccagtcatgcgacccgcacgaatctctttatcttccgcatccaatatgaaacgaatctggctacctgctatagtatcattcatggattatataactccttcgatataaatgggatgtattgaaacgattatcaatttatcgatggatgattgccccttgatgattcgggtttttctctaatacccgctccaactcaagttcagcttcactcgtccgccccagccccagaagacccaatgcccgcatataccggcaatgttcttcatttcgctgatctaaatcgtcgtcgaatactagaaaatcgggcagagataccgcaaaataatccattcggatatgatcatgcatatgtctttccgcatagtcaatgagtttgttaaagcgtcggtttgcttccttcacattgccaagtttctgccaggccagaccctgataatagatggattccggcggttgatcattataaaacatcgcgcttgccggttcgttcaaaccgatggatgctctgtggaaattctcctctgccgcctgattcttcttcagttgctggtaggcacagccaagataaaagtaaacgggattatctccggctccctccaatttaccttcacctaagttctctgggtaaactaatgccttctgcaacagctccaatgctagttcaggttgttgtttctccagattttgctttgccagttccgtcagtgccgtaacatattgtcctgttaccttgccttctccaccctcccatggatgaaaccgccgggtctgaagggcattccatgcttcttgatgactaccttgcatattcagtaaagtcacccactcgatatacagatcatcacggtggtgaaccaactccatatgttgttccagcaatttgattcgatgttcgcaggaataccctatcttattgtgcaattgatccaactcgtagaagattcgggcatcctgtgaatccaaccggaaagcttcctctaatgattccagtgcaagatcaggacgattcgacttgttaaaataagccagtcccagattccgatgtagagtcgaatatgcagcatccagctcgcgtgaagtttcccaatgggtaattgcttcctcatagcgtttatgatcatataaccaatttcccaggtaatagtgagcacgcgcatcattcgaatccactgccaatgcatcctgaagcaccatgaattcaaataacgtattaggaaaacaataatccgttggagcagctttcccctgcttttgacattcccgggcctgctccacatcccccagctgacgatacaagtaagcctgagcataaccaacgataggatacgtccgtgaatttgcggattcaacataagagagtaccgtcagtgcttcttccaacaatccacaatccgcgtagtctgccgctagattcagataattataaacgtctcctcgcatcagacgatggaaatgctcacgtgtttgccccgcttgttctctctctgaaggtgtagtcgctccgctatagatcaggactaattcatgtgaagctccaaattcaaccgggtccagttccaatgtctcacgcgcatattgaatggcctgtttatattgacccaatctacgtaacagagccaccttcagatgccgagccttataatttctggtattacgaatcagcgaacgttcaatgtgagccaacgcttcgatgtcccgttgtaacgccgtatcgatctgagcaagtatgtaataacctgtatcctgatactgtgcagaccatacggctttatacagggctgcgtaggcttcttcctgtttcccctgtaatttcaaactcagaccgagttggtaaaaagcttcactatcatatggattcgtatttttccacgtcagcgattgaacggcctgtctgaaatgcttctctgcatcttggaacaatcctctacgcagcagcaatgtgccataagcaatgtttagacgaatatccgttgcatcacgcttcaaaccttccagataataaggttccggttcatacgtggcatgccgatattgctccaaatgaagacccgccagatatagttgttcattcgtacgaatctcggatggtagcgggagtggtgtggccggatctggaacttcctgaatctcagaacgttcaggttgataggctacaagtacttttccttccgcagttcgaacacttaacttcacctgatgccattcatcttgtccgctccacgggaatgaagatttatatagttccgtaggtgagatattacatctctcgtggagatataccatggttggtcctatcacttcaacggtcacttgttcaaaaaccgacgtcgcatataccatcacggttaccattccggtcgtttcgtccatttccagattaaccgctgcatcaatcgttgcatttttgaccataccaattcctttatacggcataaaatactgcgagaatgatttcgcttcatagggctgtaaccatgtaaaatcaggctgattatcggtatagatcccggtcattaattcaatataaggtccatcctcgtccgttaactgacgatcccaggcttgcccgaattccccgttcccccaggtccattgcttcttgcccggagaaatatgatgattggctacatgcaacaaacctgcctgaatcccatggtcataaccccctacaaaattataatccgacttatacgccatataggatgttggaaccggtatgtttttgtatcgcgagatatccacaccttcggaatagtccatcttgtaataggtgccggttgcgatgggaaagcgggatacgtcccgttttccatggtccagcacagccgttacatcaggtggaaacacagattgcgtatgatcgttgacagctacagccgggttggcccaccatagaaaagtttgaggtgcgctggtgcgattgtatacctcggcatggatttcaagataggctttgccgggatgtaatgtgaagccagcggtcattttggtaccatacatgcggtcaatctcacccacccacgcggtagcgcttccatcttgattactgccaaatgtataatcgactggaccaaacgtgttgggccgatgatgctgtggccagttgaattcaattcctccggaaatccatggccctgccagacccacgagcgcaggtttaatcacccggttataatatacaaaatcgtagttgttggtccgatccagcgcacgatagatccgtccacccagttcgggcatcatctcgatacgtacatattcattttcaagaataattaatcgatacgacttcattttggcatcatcttcaatgctgtcgatcacaggatgcgggtataccttacccgaacttccctggtagattcgcttttcaagaaacatcggatttttgtccggtttacctgtaccataggttggaatatctctggtttcttcccatatgcgaacatttgatttcgctgtcacgtgattcaattcgctcactcctcggcctcgtatatattgtgatcatacgctccgacatgcaggaagaacattgacattaagcggttcttgatggacgatcttaggattcccccataaccaaagagagtaccgatccactgaataatgcagtgaaaggtactctctgatcaatcttgattaacttatctgcgacgtgcaaaatccacaaatctgaacttgtccggtctgtgcctcgactccgtatactgaaattgactggcatcctccaggtacacctggctcctcaccacaactacattgtggaaaccttcaaggtcaagtaatttcctgtcctctgcggtgggttcttccaccaaaatctcttttttggcaaacgaaatcgaaagccccagctcttgctcaatgtactgatagatggaatcattacagatctctttgctgagcccaggaacaagccgctggctaatgtaatctttgtccagtatgacatgctctccatccactttgcgcacacgtctgatctcccagacctgttcattcagaccaaagttaatcttcttgtgcaacgcctgatccacctgttgctcctcaaaaaccttcacatacgtttgagcacgatgtcccatttttttggccaattccttgaagctaaccagacctgagatgggaaaatcgatcttgcgtatatccagtacaatcgagcccttgccttgaatcttctgaatataaccttcttcatacaacattttcaatgctttgcgaatagtctctcgagacgtttgataactttccgatagatccagttcagattgaagtaacgtccctgcctcaatctctccggtccgaatacgatctgcaatatcttcatatatccggataaatttattattcattattcatcaccattgttcattaccctttttttatcatattggcaaccattatagcattaaaaaccaatcaagcggtaatgtcgttactgccgatgattgcagtatcacatgtaagaatcaattcaatctagatatgacgatcaaacgctgacgctttctccacttgatctgtacggttctcatccataacttgaatcagcttatttaaacggaagatcagcgctgcagcttcggatctgcttaagtgctgcatgggacggaagctgccgtcttcatatccggtaatcatgtacaaacctgcaagttcctgcacttcttctttggcccaatcagatacatcagtctggtcggtaaacgctcttggggaagtcagcggttccggtctgattttacgaacaacatttgctataatcttggatgcctgttcccgtgtcaccagcgcatgtggagcgaatttgccgttccccatgccttgaaccatctcatgatgaacggctgccttaatctcaggagcaaaccaatcctcatcgttcacatcctgaaatccatgttgttcattaaccgttgtgtccacacccatcagacgcacgattaatgcagtgaactccgcacgggtgatcggacggcgtggctcgaagcgagtttcacttacaccttgaatgatattttgttccgccagccaggtgatctgatctttattaaatgtttggctgatatcaataaatttgataatttttttcacaggtacatcaggctgctcagacggttctggttgtgaactcacctcatcggcttcttccgatgtaccgtttggactcggggttgcaccgccaccgctccaggcggatggtggatacggaaaagtcatggctgctgcccgttttctttcacttttttcacctgctgaattctccgtccatacttccacctcataatgctgctcggcattcagtcctgtccatacatgactgcgctgcgtgccacggtagatctcacgatctttatgggtgatcacaatcacctcatttattgaatccagttcccaagttagcttaatcgcacttgtgccttgcgctacggctgcaactgtcagatcctcggaaggcaacgtctcgaattccggaacctggagcgcctcaccctcacctgcctcattaaatggaacgattgcaaagtcagtataacgctcggcactgtttaattcagacacatgtatggatgtctccgttgttgttcccacaagctcttcgtttcgataaactcgataacccccagcaccaggaatcagttcccatacaatgtctgcaccatacatggaacgcccctctactacaggagatgaagcagcactaccaggcaaagtcattgcatgaaggtaataaccaccatcactactgccggaggcattcatggccttcactgtatagatatagttcacgcccggttcgagttccttgtcgtcatagaacagttcgtctgcaagaacacgagcaatctctacaccgttacgctcaatgataaactgctcggcaccttcgacccggctctgttccaatagaagacgaatgtgatccttcgctgaattaaactctactttgacaggagctactggtttggtcagaacggaatacgccagcttctccgatgcatctccctgatcattctctgtgtagatttcaatcgagtactgtttgcctgcatccagttgatcaacaataaactcttttgttttgcctcggtatacttctgtaccatccagtaatataacgaaagtttcgttcccataagggaagtcccattccagtttcgcatgatctgtctcggggtatatcttcatttccagtgaatccacatgaggcaaggtgtaaaaaggagtcacgatcattggacttcctgaaccagccgtattataaggaataatctgtatctgatcatatcgggttgcactctccagatgagttaatctcacctctgtgatatccccttcttcaatcgtggtgaacatctgatctccgatacgtatggtatatccctccgcaccttgtacctttggccaagagatcaatccctccttttccccaatcttgcttgcatgtaaaggttcatgaatgatagcaggaaacgttcgcaagtgaacttcgaaaccggaatcactctctcccgttgcattggatgttttgatggtatacgtgtaatgctcgcctggtgtcagtccatcatcttcaaatgaagcttgatctgctggaaccttagcgacttcaacaccatcccgcataatgatgaattgctctgctccccgtgttgagcttccagtcaggtccaataccgcagtcttatctgtgatgtgtgttatgcctgccgtctgaggtgatatgggtttcgttaaaacttgaatctgaatagactctgaccgatgcccatcttcattaatcgcaacaagttcgaattcatacgccgtgccatccagcatactattgagatgtacagacggttcagacacgctctgtacatctcccgttacctgatttcgaatttcatatgctgccgctcccttaacaacatcccaagccagatccaccacatgtgttccggctttcactgttatactttctgcaaccaatggcaacgtttgagtcattacactgaaagtaagcggcgcactcgttccactcgcattgactgcccgaattacataagtgtatttcgttcctggcgacagatgcttgtctacaaattggggttcacttgaatccatctgagcaatctctcttccatcccgttcaatgacataatgatctgccccttggacaccagtgttactgaaatccagacttaggctgttttttgccacatcatatactgcaaccttaacgggtttctcaggcaaagtcagcagagatacatccgtcgcttcagaacgagttccctgtctgttgaccgcccatagttgatagcgatgccacgttccatccttgagtcctgtaatcgttgcttcattctccattcctctatagatctccttaccattctgctcaatcacgtattcagcggcaccttccacgacagaccaggaaacttttgcatgatgtactcctgaatcaacaagtacttcggcaggcgacacaggtttggacaatcggatgagctgagctgtttcacctgatccagaagcattcacagcctgaacttccaaagcgtactctgtacctggcaacaatccctcaagcatgtaggccagttctgatgttctgcccatttctgttccattgattttcacaatatagagattcgccgtatctacagcttgccatgcaagtcccatacttgtctcaccagtcgatgtgacattaagtccttccggcctgctaggtagcgtaagaattgtactactggtagatacaccgtacccggcagcattgcccgcctgtacttcataggtatactcatgactgcttgacaggtggtgaactgcgagttgtgtatctgatatctcatggctctgtccatcgatgaccacccgatatttcgttgccccagctacaggctcccagctcaagattgctccctgttcagttacttgaacaacgtgaagtcccgacgggctctccggtagtgttgttcctgataccgaactgcgtatcccctgtccacttccgttcactgcttgtacatccagttgataagatgttcctgaactcagtcccgcatagccccattcttgggttccggcagaaaccgttcccgacatctctccattcaaccataactcataacgatcggctcctcgtactgcttcccaattcagacgaaggctcgctgtggaagcatcggatacctgtaagccggacacttgcccaggtaaagtcttgagcaaaggtaatcctgccaacggtcctgttcctgtctcatttccggcaattaacgtatagctgtactccgttccgctatccagacccgagtccagatactccgtctgctctccttcatatatggctgctccatcacgtgaaagaccataatacgttgcagaagtcactgtctgccattctaatgaaatatcatgctcctgaatttgaacggccataaattctccgggcattgccggcagtgtgagaaatccggttctactgctaccacctgctccactttcattcattgccgttaccgaaatgttatgaatggttcctggaacgaggttgctaacatagggaagactgccaggatcagataccgtctgatcaaatacggtggcaccgtccgaagtagtcgcgatgatgcggtaagcatctgctcctcgtactgaatcaaaatgaatttcggccaaattgggctgtgaatctacttttctaacgtgcaacgttccgggagctgccggggtagttaatacttgaacacttactgcatcacttactccggtatggtttctcactctaacttcatattcatagacctgaccaccgcttagggagttatcgattatactgtggttaggataatccagtgtccatgactgtcctgtcgttttattcgttatctcatactgatatccatcggtatacctttccccagttggcaaatccactgtaagttcagctgaagtctcagcgatctgtgtcgttttcacatgagtcggttgctggggcttgcgttgaataaggtaaggtgatgatgttgtctcatatgtattccctgctctgtccatggttttcgcatggatgtaccatataccttccgattcgatggatattttatgctggtcagagcgagcttcaagccaatgctccggtgattctgcactgttcgtaacttgatagaatcgttcccgttcctgaatgcctgagtgggcatcggcatactgaatggtagtggatatatctatatccgtccaagcatgtccgttcggtgcaaatgtaatcgttggagccatctgatccacataggcgattcgactcacttccttgcttacattgccaacagtatcccttgctctagcccgaatggtggtagcgccgtttgtgcttactgtacccgtattgcctgcaatataaggagcatcgttcatgctgtattcataggatatcgcttgttcatccacacttccagcgatagtgaattgcacatgttctttactccatccagaagggcttaaactaatcaccggctcggttggagctgtcgtgtcaattcgaactgtagcctgagcggacgtgcttatattgcctacacggtcaagtgagcgtgcatatacgatcgtttctccctcatcggtaaccgtcacttcgcccgtgtaatcgatccagggaccttctttgttaagtcgatattggctcttggcaagcccactgcccgcatcttcaccactgtttattgcaaaagttacatcctcattcgtccaatcctcttcacttaacgcaatcgttggttgctcaggcccagtcttgtcgattctggctgttgccgaagtggaagcactgacattggcggcccgatcaacacttcgtgcgtaaatctcagttatcccttcttcacttagtgtaagaggagccttatagtcgatccattctccctcacttcccagcttatattgtgtcagaccaatgccacttgcttcgtccgtaccctccgttaatgtcacgattaccgccgcttttgtccaatcgggcggattcagcgagatgacaggtggcgttggtgccgtccgatctactctggctgtcacagccgtttcctgtcctgtattaccaaacgcatcaatactgcgtgccataacagttgtgtttccttcactgcttacggtaaacggagcgctgtattcacgccattctcctgccggaccaacttttacttcagtcttctgagttccgctcaaggcatcctttccttcttcaaccgtgatgagaacatcttccttggtccatgaggatggagtgactgtaacggaaggagcagttggacccgttgtatctttaatcatctctccagcggatataaacggagtctgtatcccttcaccattcagtgccgccacaaatacttcatattttccgtccgcgagtccggtaagggcaaacgctgtacgtgtggaagttgttgttcccgttgcgaggacttgcccacctggactgcgtatttccgttttataatgggtgcccgcaggatttgcattattattccagctcgctgtaacagagttgcctgattgtgtcacagccgcagcatcgggtggattggccaatgtgtattttgtggatggactggagtaacccgtataggaaccacttgaatttttggcacgtacagcaaaagaataactggtattcggagtcagtccagtcacctgccgactgtttgatgtacctgtatccacgatctgattcgtcgtcatatttttcagttcatacgttacggatgcatcattagccttcttatcccagttcaccgtcaagttattagggtcaaccagtgtatacgtcggcgttccaggcacaacaaaacttctaaccgtaaagttaacggttcctgccgaggatactccacctttgtcatccatgacccatacttgcaacgtgtgtgtgccatctggcagggtgccaggcaatgtataattggtgttaaaagactgatttgaacccgtcgcggtcatctgggtcaaaatgttctcagacccaccatcaatggaccatttcacggtcaacaggtcgcctacatccgtatctcgcgttgtaccagagatctgaagttgctcgcctttgtaatacgtttgccccgaagaaggagccgttagggtaaatgaaggtggaacgttctgagggccgattcccacgatcgttgaaaatttgcgtgaagcctgattcgctgttgctttggcattccaccagaattgcgctgctgtatcactagccgtaacggtctggcctggagtgaatgacgaaggtgaagaaccccctgttagctgcgcattgtccggaccgctgtactgtcccatgtatatgcgatctgcattcacaacattgtacgtattcgcataaaaagccgtgacctgaacgccgccgctgtaattgcgccatccattctctatgacttcaaacggagatgcatcattgccattcaccatcgtatcccaataaaatgttccacccaaattcagtgccgatccactacggttgatggcttccagttcaaccttcatgtatccaccttgtgaggtagcattaacgatagatacacgcaaaatatactcgacattgtccttttgccgggacatttcaatcacattattgttaattcggtaataattaagcggcaatgttttgaagttcacgggtgatccattatggtcgataatcgtggatacattccctgtatcaccaccgtaaaatacatttgtgtttggtagtaatacaattctgtatttgccatcactgttcatctctactttcaccttggatgactgtaccgccttcatgctggacgtatcggatacaatcccgattgtttcaaccgtttcagccattaccgtggctgcaccccattcaagcaacagggcttgaggtgataataatgcaaatgccagcaccactttggttaactgttctgcttgtttcttcacacgttttcctgatttcttcaacgtctactctcctttttggcacacaaaaaaaggaggcaccccaacaaaggaacgatgtcctaagttggggtgcctcccctaacaagtgttattttttcttgattataacgattaagcgcatgaatgtaaacacttgatcatgaacgccttacttctcatttctcatctctgatctttaataacgcttcgtccaatgcgccaacgaccttgtcacaccatacatcaaattccggatcttcggtctgtaactcaggatgcgccagaatgtgctcaatcgtacgtcgaatgccctgatcagctcttgtcgttgctacaaattccggaacaagccgcttcagtttactgttatcaaacacaacggtattggctttgtcacccagcaatccaccgcgaagatcctgatcactgcatgctgccaagaactcagagggtacatgcaccgcatgaagcttaacccccaatacgctggcaataatctcatgaatctgattccaggtgacggattcatctgaggtgatatgtaccgattcaccaatggcatggatatttcccatcagcccgataaaccctttggcaaaatcagtattgtgcgtaatggtccaaagtgaggtgccatctccatggatgataacgggttttccttcatggatacgcttgagaacctgccagctgccttgagcaccatgaacaccgagaggtaccgatttgtcgccatacgtatggctcggacgcacgatggttacagggaatccatgctcgcggtattgtttcatcagatagtcttcacaggcaatcttgttgcgtgaatactcccaatatggattcgataagggcgtcccttccgtgatccggtaatcagccaaaggtgtctgatacgccgatgctgaacttataaaaataaactgcttggttttatccttgaacaaacggtaatctcgctccaattgagacggtacaaaagcgataaaatccgccacaacatcaaattccagatcagctatcagttccgctacacgtgcttcgtcattaatgtccgcttgaagtaccttgacttctgctggcaactcatcgttccgattgccgcgattaattaaataaagttcacagtcttgctgtgcaagcatctccgtaatggccgtactgatggtgcctgtccctccaataaatagcgctttcatttcgccacctcctgatcgattttacccacttttccatgatatcacgcaccaaaaaaaggagcaaagctcggcgacccgaaaccttgctccttctgcttatacgaccttaatcgttgcatatatcatgtacatgccgcaatggatctcatattctcccttgggcagatctttgtcgaccgtataataattgggtcccttttgcatgtatagatccatgccaagcttttgtgatcccactgatttcacatgtgtcaccgaccgggtcagaataaagttgattttggtcggtacgccagccttcacctcgatgacgtctggtccaaaaccatcgttgctcacgcccacatcaatgacttcatatcccttcaaatcctccggagtctcggcttgtgctgttaccgcacttcccgatccgggggatacgtctttgcccataaaataaaccaaaaatgatccaagcagtacaacaacggtcagacccagcgttaaccaaggccatgtttttccaaaccagcttttcatataaacactcctcattcgatgtcccatcaatattcaatcaacagacggatgtattctttaagcatacctgattcgcatgacaatgaaaatgacccctctgggctattgcgattgagcaaaaatatttcaatagaaaaagcctgatttctcaggcttatctacgggtattcccgttcatgattcgcaatattccttttcgtattaattaggaatagatcggtgtattccgacttcgtctcatgcgtaatttatacaactctggcagggctacaccaatgagcacaataataactccgaaccattgcaatccgctgacatgctcatggagcacgattgaggataacaaaactgcaattggaagctccactgcacccaggattccggccatgtcaccaccaatatgcggaacgccgatagcgaacagtactggtggaatgaatgccccgaagaatccaagcagcaatccaaatacaagcaactggctccagatcaatccgttaaagaggaatgtcggtgggaacaaaatgcacagtagaatcaatccgcctgtaaccatccacgcactacgaaaggctggatgcgctgaaggaaccgctttgccgctgaacaagacaaacagggaataacttacggctgccattagtccaagagcaatacccagaccgttgaactcacccaatccttgttccaggaaacccgctgccagcaaggttccaccaaacagaatgatcaacgtcaggaacgtgactttgtctggacgttgacgtttgcttatcgcctgaatcaatacgctaatccaagtgaactggaacaacaggataatggcaagtgaagccgggatataacgtaaagactgataatacacgagacctgtaattaccgttggtgttccagcagccatcaatatcagacgttgtttccacgtcaaccgcttgaatacctgtgccacggctcctgatgctttgccatttgcctgtgacttacgttttgttctaaattttgtgtatagcgccagcatccaggatagaaggaaacccgtgatcagctgtgctcccacaacctctccaagtttatatccttcgccgtacgccagaaccacaatcgtggataatatgccatagctcatcgctcccgcgagaacggacagataatatttcattgtgaataaacctcctgatgataagaaaaatacgcctgcatgttggttcatgccaaggtcacagacaccatctaaatgcaaaaaatcctaactacgagcaaggaatacattgattccttggcatcgtagttaggaagtataggcttcccgtagagaccctcgccctgtgtacactttcggcctgcgaggttatacgaaatgatatatgcaatttgatgtaattcgtgtgtgacgacttttcatatattacatgggaggtgagatggtgtcaaccctattccgtataaaaagttaaactaaattattacaccgagtcgcttcgatcgctgtaccattcttcgagtactctaattacgtaaaaacgtcatgtccgattgaagcctgaggagtcccactccaatgtttgctgtaaacctgccttcaatccttccagatccagcccatctacggcaaaagcctcacggatcaaaggcggcgcgacaaattcatcatacttgcccagataaggcgcttcatcttcagccagtaacgcagatgcgtcttcagccgttcgacactcactcatgatctcggctaacaatgttcgttcgtcgaccttgccggacactacaaaataatatggctccatgggcacaaccgaacgcaaggcaagtttcttggacagattatgcttcatcaggcgctccaatgtacggaatgatttacttccaacccaaggaagaacatacatcgaatctccccctgccggaatcacgacctgctttaacagtccgctttcacgagctaggcggcgcgcccgttcaagtcgattgacggcttgtggtgacaggtaaggatagatggtcgagtcggacaacacttcacgcattttctgtactaccgacgtatgaatatctcctcccgctccaagccataacgtatctaccttaccttttgcagacttcacatacacagccttgtgcttgtgatcgacctcttccactttccacagtttgcctgcgagcgagaagcaatagccaggtgggggcactgttgtaatcgaaccaatctcttccgagccgtttagtactttatgttcctcatcgtctttaaacacggcgtagaagcgataattattcacaattttctcacctgtcagaccgatgatcaatgttcgatcctctgtccattgcagatgatccgtctcaatgaggtaattcaggaatacctgatattgatcaggtctgatcaacgcaaatggggccagcgaaaggatggcttccgcaagatctctcggctccgcctcccccatacttttcaacatgctcatcgtctgatggtagagcacacctatgggcattttgcgagcttcaagaggttcgacccacttggtttttacatagagctcaatgacagcaatcgcacgcattaacgtccacggcatacgtgctggcaattgggcttcctcatcctcttcctccggacatacaaaaagcatctctgatgccatatcctctcgtctccctgaacgtcccagacgctgtacaaagctggacgcactatacggcgcaccgagctgaaccacacgttccagctcgcccagatcgatgcccagttcaagcgtgaccgttgccgcagcaaccgcgggacccgatccagtgcgtagggcagcttccgtctcttccctcagcatggcggagatacttccatgatgcacatggaacacatcacgctcttgcctgcgagccgcgacccgccgcatctcaagaatggtgacttctgcatctgtacggctgttggtgaagatcagcgcttttttacgatgtgtgctctcatagatgaagtcgtagtacgctttacgtgcgttatgaagctgctccgcttgctcctcgtcctgcgcatctggaaaagagaaatgttccacccgcaatcgcagcttgcggccgcccggggaagagaccacatccaccccctgctgcgttccggcagcaagccaagacgtagccgcatcatagtcactaagtgtagccgacaagcccactcttcgcggtgcacagccagccatacgctcgattctggcaagttcgctgagtacttgaatgccccgatccgctcccatgaaagcatgcacctcatcgatgatgacataccgcaggtcatgaaacagcgccgggattgcattcggtcgattcatgagcagaccttccagcgattctggcgttatctggagcacaccggacggatttttcatcagttttgttttctccgcctgaggtacgtccccgtgccaatgccaaaccggaatatttccttcggataacagatccttaagacgttcgaattgatcattaatcagggctttcagaggcccaatgtacaaaatgccaaccgacttggaaggccgttcatacagctcggtcaatgcaggaaaaaaagccgcctccgtcttgccggaggctgttcccgccgcaatcagcatatgatgcggggtatgaaaacagatattacaggcctcaatctgggcaggacgaagcgattcccatctttttttataaataaattcctgaacaaacggcgccagccgatagaatggattatcactcataattcaaactccgctaggaagtcgtccagatcatctgtattcgcggatgcatctgcccctttactcgtttcctgaggtttggcaacccgctcgccaagtaattgagtataagtcacttcaggattctggtgtaacgtatgcagtacatccataaagtctcgtaccacttcacgcgtggtcagcaattcatccgcacccagtcggttcaccgccgtttgcataaaatcaaccaattgttcatccgtcagacttgcactgtatccaaaatgcagagcatgaatctgtcgtagcttctggagcaaaatcagaatctcttcatgcgataacatcgccagcttcagaatcgggcctgtataattcgcatacgctttggctgcatagcgaccatcaataagcctggagcgaagcgcttcatagctgtataatccacgccgttcatcctccacaaactgtggcgtaccgcctacaaatatgcccagatgctccgccttgccctgcatcgtatcattgaacatggtcaacaatttctcatagttgctttgacgggagacactgtttgtaattttgtacagattcaccgcttcatcaatgaacaacagcaatcctttgtaaccaatgcgcgctgtgaattcagaccacaatttgaagtagtcataccagttgtcatcgtcaatgataaccccaacagccagttcttttttcgcttccgttttggttgcaaattctcctcgaagccagcgaagggccgcctgtttgcgatcatcatcagccagcttgtacccgttccaatacgaagccaataccttggcaaaatcaaagccgtgaaccagattctgcatttcccccgtcaccacgtagatctgtttctctacctcaagcggcagagcgggatcatcagggcgcaggttctgactctgcatcgtggattgttgcagccctgcgatccatttttgcaaaatcggctccaacgctcccccatccgggcgtgtgcgtgtagacagacgagtcatcagttcgcgatatgtcgcaagtccctggcctttggttcccaccaatcgtcgctctggtgacagatcggcatctgccacaacgaaatcccgatccatcgcatagttacgaatcatctgcaaaagaaagcttttaccactgccataacggccggtaatgagtttgaacgctgctccaccctccgcaatattgtccatatcccgcaagatggcttccacttccggtttccggccaacagcaatctgctcgagtcctatgcgcgggacaacacccgccgtcaatgaatttacaagtgcggtggtcagccgctttggtattttaagttctgtcactgcgtatcacctcttcacatgttcgaacacatctatataatcaggaacaatccgatcaccatcaatcagaagatcaccgatcgtttccatagccacatcattaatttcatccagcagaagcgcaggcatcgttccatattgctcagccagacgcatcagctctgtatcaggatttgcgccaagtagaacatgaatcgtttgtacctgctgaggggagagttccttggcaaagagcagccattcctcatccagatcagcctcagcagactcgtcccactgcaacctaatcgattctacttgcgctcctgttgcaatctctactgcagatggctccgactccatggaaccttcagttggagtgatctcattccttgcttccagtacatctactggattacttgcaacatttgcactgttaacctcttcatccttcacttcagaagggtgatcatcctcaatcgtaagcgccaatcgcacgtactcactttcctgttgtaacgatgctaatttctctgtgtcaatccgaatcatcggttgttccacagactccgcctgctcggtcgcatatgttttgtccaggtaacgttcaatcagatttgcaagttcgggatcaagagtctgtcctcgcaatcggcctctgaatccgagcagttcacgaagtttattttcagtacatcgatagatccgcgtaaccatctgcacaaattcagcctgttcacctatgggcatatatctgaacgataccgatcttccataaatcgaatcatcatagactgctttgcgaaacagaatgcgctccatcgtgcgttcatcgttaggatcacactcaggcaacagtccaacttgtcgcgtacgttccaggtacgaatcaaccaaggccatgacccgcgggatgtactgctccatcacttctttgccgccatctctgtagaatttactgagcgtaatatcgtaatcatagtatctttgcagcatattcagcgatatatccgattcattatcctgtaaaatacgttgcagctccctatccagcatctctgctggcaggtatccgcccgaaaggcccataacctcggataaggacatctccatctgatggaccagcacataatcgaccatccactcttgcatatatatatttaattggggcaaccgttcacggtagttcacccatagctgcttcaattgatcataaccatcctgaggattctgccagccaatgccgttaattaactcgtaaatatgaacaaatagataagacagatcggtatccggatatctcccctcacgtacttccttcctccaaaacatataccacttgcgctgggcttcgttcatcacgccatacgttggccagtaactcataaagggaacccatggggaaacatccccctccatctctgcccactgctttgcttcttctacaaaacgtttctccgaggacaatatgcctccacgatgctgcatcgtatcatgtgcagactgcataatggttgaacgatcaggaaccggaactgctgctgtttcaggttcttcactcagatctatctccataaattccaattgtcttgagttgtctttcatagaacgttatctcaccctcctccaagacagaatacgaacaagtgtatccatagggatcattatatcacttgtcctgtgtctgcggtgacgaaatttagacattcctggacacaaaaaagaaggcattcctgccctcttttcatcatgtctatttaacttttttctgtcctctccgttaggtgtaaatgtattatttcaacttatatagataggttccttttaatatatgaaaaaaagtccgccctacgtattaatccattgatctaatagtcggaatgtctctgatgcactgtgtaccatgttgtcatgatcttctggagtgctgatggactgctgcagcaaacctgtaaactcgctccatcttgttcttgtctcagagccgtaagcattgaaatattccaatccacgatcagcttcaatgggcaggaactgcgacaaacgcttggtcatgatctgtccaccgttcgtggacccctcaattacatacaggtatccaaacaaacgggcaggtgttgaaatatccggcagttcttcacagagcggaagttggctgatctcttcttcactggcacccagatttcgtaaatctttctccaacagtccagccttgcctctaatctcgatatccaatcccgtacttccccagaaaggctgttgtacagcctgatcttccagtggtttcaggaatccataaaatttctctaaatatgttctatattcttctatagtcacagtttgattcataatggcttttgcataagggttctgttctacttgtctgtgataatgagctgtctcgctcttcagacgttccataatagttgttgcagtcatcttagttatcccctttcacaatctgttctattgttgcaaatgaacgctgatcctcaactgattctcattgcgccttaaaatagaactacttgcgctgcaatcagctccatttaatacaaacaaggctctatgtaagtatacttattcttgtttgagaaaactatatgaatccgtcattgtttcacgttagattatttcccgcattgttatgataactagttataattcataggataaaaaaataaaaaacgacccctgacgtcatgtttgtcaggaatcgtttgatataaagatgatttatttatttatttgcttgtgggatcggaccccgaaccccagttttttaacttgtgtaatagactgattagagccggaagcaagattggaagcatgacaaaacttagcaaaaccaatccgatgatgacagaaatagctacttcaatcagtgtaacaacaccggaaggaattagtgcggcgaaggtacctcccaatattactgccgccgagatcacgacccctcctatattacgggaagcttccgtaattttatgaattggatctccttcaatctcacgagatttcatcatgaggaagatactgtagtccacaccaagtgtaacaatcatgatcagactgaagaaaggaacgttccagctcagatagtcaacgccaagcgggccaaccatcagcaattcattcagaccaagggccacataatacgtcaggaataacgcacctataatgattacagtctgccaaaacgaacgaataatgaacaaaagtatcaatccaattccaatcagcatgatcatggacgtccgattcagatcacctccggataattctttcatatccaggttctgtgacggtatgccgcccagtgccactttcgcctcactcaaatccgtgccaaccaaagccgtttccaactgctttttaagattttgaacaacatccatcgcttctttcgaataaggattgtcggtcaaaatgatggtgatttccgctgtcttccgatccgaagacatatacatgtcgagcgaacttagaaactcttctccttttaatacttcttctggaatgtagaagcttttcgcagcatcagactggccaagatgacccaaataatcttcggcatcaccaagacccttcgacacatctgagagtccttttgtactttcggtcaatccggatttcaactcacccattttgtcctgcaaatcgttcaggccgcttaacaactgactctgtccttcattaatctgacccagcccatctttcacttccaatgttttacccgctatctgcttggttccattggctccagtggccaaacctttggatagctcaccagcaccgtcttcaagctgaccgacacctacagcaacctgagtcagaccgccactaatttgagccattgactcgttggcttccttgaaagaaaccatagctccattgtactgctgcatcaacgggtccaactgtgtgtataacgcgttcagttcagtttgagccgcttgcgaaataccaatcacttttagagcatcttcttcttgttgtaactcagggtgattcgcaattagacgggtcatgctgccttcgatctgagcataggcatcaagcgctcccttaatagctgtcttgatgcttgtgaaagtaccacggaaggaaccaaatccctgttcaagttgcgtataccctttttgcagatcactggcacctttagacaggactccaaccttttctttaagggtagtaagtccgtttttcaacgtctctgccccatctttcccattattcagcccatcagatacctgattcatggcgtctcccaatgcatttactccaacttgcaaccggcttgtcccgtcaatcaacagctgtacgttacttaaatcatttgatgactgaagctgtccagctgcagaggacaaaccttccttaatttcgcccacaccatcgtttgctttaccaataccctgattaagctcctctgcttgatcgttaatatacaactctttaatttggactccagttggtcgagtgacactgtaaacctcagagacaccttccaccttggacatcttatccgttagatcatccagtgccttcagcaatgtctgattgtccattgcctgctcggattgcacaaccaatgttgttggcgctgagaatcctggtgcataatgctccataatcagattaatcccctgtttggaattgtagtcattattgacttcaaacaggtcattataacttagtcgattactgtaactgaataataaaggaacactaatcaccgcaaccagaatgattgccaggaaaggtcttcgtaccgattgacgggataaaaatccccacagtcggctgtccgcatgaccttcgaattttttcgatggccagaacatttttttgcccatgacaaccatgaagaacgggttcaacgtattgaggacgataatgagaaccgctactgcgatcgccaccgcagaggttgcctgatataactgaaacttggcaagcaggagtgaaagaaacccgatgaatacagcgatgccgctatacaatacggttctgcctgctgttttaaatgtcgttttggtcgcaagaatcacatcgccatcttgtctacttagttcctccttgaatctggtatataacaggatattataatccgtaccaataccaaagaggataacgaccataaatatctgagtaaagttcgagaacggaaagttaaaccaatctacaagatatcccacaatagctaatgaaacaacgtaagatatacctaccgtgagcagtgaaataacaggtatgatcggcgatctaaaaataattatcaggataacgaggatgaaaatgatcgcgataatttctgttttctgcacaccgtcttcaatcgatttaccaaaatcatcatcgatcaggtcagctcccgtcagatatgtatccacatcagggatggctgtagattcttttaatagactaatcacttccgaaagaggaatattctcatctttagtgacggtgatttgagtcaggatcgtggttcggtcctcggatataagccgatcagcttgctcttcaccatccagatggcttgtgatcgtctcaatattcagttgctttttctgatttttcaggttggataaaacggattcgatctccgtcttttgctggttcgttaatgcttgtgtatcttctccactattaaatacagcaatgatggaataagtattcccgctatccttatccatatctttcaacatagtcgcagcaacctggctttgtgccgtttcaggaattgaaatctgtcctttttcttttaccagttgaccaaaatcaggcatcgccactacagatacgagagtaatgagtatccaaaaaatcagggaaatcgttctgggattcctaagtttattcatgatttatcttcacacaccttatgtctagtataggaatgaatattcattccgtttatgttgtaaaaaaggccaatagaatcaatggactctaatggcattccacaggcactcctcaagctggttcattaactccggcgtcgcttccaggagacctttgttaaagtgttcaaacaaatgtatgaaagcaccgtagactatattcattaaagcttctgtaggcagtataagaatggctccttgctgctgccccttatgtatgcattcattcagaaaccccataaattcattgacactttccttgctttcatcgtgaaaatgcaatgcattacccgtagaattaataaactttaagcgatccgggtcggactctgcgaacttgaacaatccacgaaaaatatgatgaaactggtcacgtacaggtatcggctcattcggaaatccctgttttaaggcatcaagaaactccctgatacttttctgaaaaagttcattcaacaatacttccttgttcgtgaaataacggtaaatagttcctgctcccacctgagccgaatcggcaatcatcggcatggttgttgcatcgaatccccgctgagcaaaaagcgttaaagcagctgcaaaaatatcatcttttttgctgcttttagccatgtggctacccctcctttacataggaatgaacgttcattccgttatgtttgattagtataactccttttgtcacttcaagcaagacctttctattctactgtttattcttcaaaatgatacaataactataaaatctattatttgggaggacttatgttcatgaatataaccattcaagacattatacagtatctcacagcccatgtagagttaccggagaacacggtagatcggctgattactggctcgtccgaccaaacggtcacaggtgtgtttgttacttttatgcccactcaacatgtcattgaacatgccatacagcgtggggcgaacttgatcattgcgcatgaatctccgttttacaaccatcacagtcatacggattggcttgcaaatgattcggtttatgtggacaaaagaaagttgatcgacgatgcaggcatttccatctatcgatgtcatgatatcatccaccgcttccaaccggatggcattaccgaaggactgattcaggccttgggatggtcctcttatgtggagcaacgactagcggaagcagacattcttttttttccggaaggaagcaccgttgaagctattgctcaccatgtgaaaagttccctaggcatcgattatgtacgcgttgtaggcaatgcggaaatagtctgtagacgcgcagcggtactggtaggttttcgtggtaatggacatgtgacgattcccttgattcagaacgagcaagtggacctcatcattgctggagaaggattcgaatgggagacaccggaatatatccgtgatgccgtgcaacagggcaagtccaaggcactgatcatgatggggcatgcagagagcgaggctccgggaatgaagctattggcagacaggttggcagaacgttttcccgaattgtctgttcgttttgtaggcgagaagcctttgtatactgtgatctaatgatatgaatttgatgtgtacggagaggatcttctagctgattgcattgcttctaatctcattacctatcctaccccggagttttggatacttactatgctccggggacgctgggcagactctcgtttcatttcttggataactaacgaacctgacacactctatttagcgaatatttgctgattttcaaaagtaacgaatcgtagacaccctatccctccattccccctgttttatagccactttctacccgacaaagcccatttaacgtcgctgagatttgttagatttctcaattcaattgaatcagtacaataaggtgtcactggttcgttagattatgatgaaaaatgagtactgagcacatatgccacgcatcttttaataccccatctggatttcccgagttctttattgtactctaaatgctgtgacttcaaagctcaggacatttgtccttggcgttcagagtcaatttatcatttaataatagaagtcgaagtgattgaataaggagcgtacatatgagaggaattatttttgcattactgggcggcgcgtgtatcacgctccaaggtgttgccaatactcggattagcaccgacatgggcacatggcaggccgctacgattacacaactgacgggattcatcttagcggcgctgatactaatgtttgttagagacaccaaccttcaaggactcaaacaagtaaaacctatgtacttggctggaggtgcttttggcgccgtcattattttcagcgaagtgacggccattcagcaaattggggttacattcacgatctcggctctgctcattgctcagctgttcctgacttttctggtggatagtaacggatggttcggcgtggtgaaacaaaagatgaaactgccgcaatttctgggcattgccttaatggtgactggtgtcattattatgaaactatagtttttgaaaaaggattgaaacatatcgtcgggggtgaataacagcgtgcaagagatccataacgagcaacaattaatacaatatctgaagcaatatcaactcgaaactgtatttcacgagcccctgcgtacacatatgacgttatgccatttcgagaagtgtgaattgatctgtcgtgaaggggaaacttccgaatatttgtacgtactggtcgaaggtaaaatcaagattttcaccacctccgcacaggacaaaacgttggtgctttgtttcaaaacaccgcttgaagttgtcggtgacatagagtatgtccgtgaaagcgatattgttaatacggttcaggccgtgtcacctgtggtgatgcttcgcattcattatcaatggctcgctgagcttgccagcgattatgcacctttgcttaaatttttgctcaaaatcatctcacacaaattctacattgactcgaacttttccaatttcaacctgatgtatcccgttgaggttcgtctagtcagctacctgctctccatctcaacagaagaagcgggcaacgtcgttcatgaagagctggacgcgttcaatctgaccgacatcgcgaatctgatcggcaccagttaccgacacctgaaccgggtcatccagaagctctgtgcagacgggttaattgaacgacatcagggattgattatgatcaaggatcgagcgggtctaagggaaatagcagctcacaatatttatgaataaggagttcgacaaccatgttaatcacaggtatttcgcttgcactaatggcaggtgcacttgtcagtctgcagacgatttttaatagcaaagtcaatgaacgtaccggttcatggtccacaacaacgatggtgcttttcaccgggtttattgcttctttcctcatctctctgctagtcgagggcaaaaatacattcagcttccagcatatgcagccctggtactggctcagtggagccatcggcgttggcgtggtcttctgtctcgtgcaagggatgaagctacttggtcccacatatgccatctcgatcgtgctaacatcccaactgagctttgctctattgtttgattccatgggatggctcggtctggagcaaattcctttttcgtggaatcagctgctcggtgtacttgtcattgttgggggaattgtgttgttcaagttcggtggaagtaaatcggaaaaatcagagcagtcccctggaaaacttcagtctgactcataaacgaacaaaaaaaagagtgtccgtccaatcccgcagattggtcagacactctttttatgcaatcaaaccaccacgtatcgcctcgttcttttaaacgaactctacgttatggtagacctgctgaacatcttcaaggtcttcaagcgcatcaatcagtttctcgaactgagcttgtgcatcctctggaagttcaatatggttttgcgcaagcatggtcagctcggctactgtgaactcagtaataccagcagctttgaatgcttcttgtacagcgtggaattgatccggttctgcatatacaattacagcatcgtcttcgtccacgatatcacgtacatccacatctgcttcaagcaaaagttccagtacttcctcggagtttttgccttctataccgataaccgctgttggatcaaacatgtaagcaacagaaccactgacacccatgttgccagcgtttttgttaaacgcagagcgcacttccggcgctgtacgatttacattgttggtgagtgcatcaacgatgaccatcgcaccattcggtccgaagccttcataacgcagctcttcataattctcatccccgctgccttttgctttttccatcgcacgatcaatgatggctttgggtacattatacgttttggcacgttccagcacgactttcagtgcacggttcgcttccgggtcgggttcgcccttcttggcagctacatagatctcaacgccgaatttagcgtagacccggctcgtgtttgcatcttttgaagctttcttttccttgatattattccacttacgacccatatcgtttccgctcactttcaacatgtaatctgctttctactatgccattatatcttgttgagcgtacttcaacaagttaatacacacgaaataatgggaataactgcggtgattatccatctccatttgaagattaacctcagtttatcctcttataaatctctcagcagcaactaacgttacctctattcactccatatatagcagacaagaagcaccccataaaggaatgcttccgccctaaatcagtcctaatttcagttatcttactcggtcaattaagcgtgaaattgtcgaccatccaacacttcaggaacataacccgcacgaatgacaaagtctccgaaatgttccccttcgttgcgctctttggcatactgattcaccattggagttaacgtgtccagaatctcagtttcaccaatgttttctttgtacagcttattcaagcgatgtccggtgaagctgccaccgagatacatattgtatttcccaggtgctttaccgataaatgaaatctctgccagcatcggtcttgcgcatccgttcgggcatccggtcatccgaatgacaatctctttgtctctcagcccagcttcgtcgagtacaggctccagtttatcgattagggacggcaagtaacgttcggactcagccattgcaaggccgcaagttggaagcgaaacacaagccatcgagcttctgcgtagcgcagagtaatgtgcaccatcggtcagattgtattgctgaatcagcgcttcaatctttttctttttctggctgctaatattaccgatgatcagattctggtttgcagtcagacggaaatcacccgtatgcactttggcaatttcacgtaaacccgtcatgagaggatatccatcaacatcctttacacgaccattctgaatgaacagcgtgtagtgccatctaccattattaccttttacccaaccatatcgatctccgttagtctcaaaatgatatggacgtgccgcatccagtttccatcccagacgggtggtcagctcttcgacaaaccactccacaccacgatcatccagcgtatatttgaaacgagcatgtttacgaactgcacgatctccataatcacgctgaatcataactgttttctctgccacatcaatcatttgctccggcgtacagaaaccaatgactttggacacctgaggataggttttggcgtcaccatgagacatccccatgccaccaccaacggaaacgttgaagccttgcaacttgccgttctccacaatagcaataaagccaagatcctgtgaatagacgtccacatcattggatggtggtacagcaataccgattttgaacttccgtggcaaatacactttgccatagattggttcaacttcttcgtccgagtcctgggaatcaaccactttctctccgtccagccacagctcatgataagcccgggtccgagggtccaaatgattgctcacctgacatgcccactcatacacttcagcatgcacatcagattgattcggattcgggttacacatcacgttacggtttacgtcaccacatgcagccagtgtgcttaacaacgaatcgttcacttcgcgaatggtgtttttaagatcccacttcagtacgccatgcagttggaaagactgacgtgtagtcagacgaatcgtctcattcgcatatttatgcgctacccgatccatcatcaaccactgctccggggttacaatcccaccggaagcacgcacacgtaacatgaattggtatgcaggctccagcttggatttgtgacgctcgttacgcaggtcacggtcatcctgcatataactaccgtggtgtttcatcagacggttgtcgtcctctggaatagcccccgtgatacgatcagccaacgtttcggtcagacttccgcgcaagtaatcacttttgatctttatatcttccacatcgctattcgtgcgctgtgggttaagtaagttattataaaccatgctgctttctcctctcgtctctgcgggatggtgcaatccggctgggccggtgattaatagacgtcccgctgataacgtttctcctgctgtaaccgtgtcagatattccgatgcctgctcaggcgataaaccgccttcttgttcaagaatcgtggtgagcgcagcatgcacatcatgtgccatttttttctcgtcaccacagatatatacgcttgcaccttcctgaagccactgatacagttctttgctgtgttccagcatgcgatgttgtacatacactttctgttccgtatcacgtgaaaaggctacatccatcttcgtgagcacaccatctttgagccaacgttgccattccgtctggtacaagaagtccgtggcgaaatgctgatctccgtagaacagccaggtcttgccctctgctcctgtttcttcacgctcaccaaggaaagatctgaacggcgccacacctgtacctgggccaaccatgatgatcggtgtatccgggttctcaggcagcttaaaattcgggttatgctgtatatatacaggcaaggtgtcgccagcttcgattcgttcagccagatgtaccgagcatacaccgtaacgttctctgccacgcgcttcataacgtaccgagcgaacagtaagatgaacctcatccgggaaagacttcgaactactcgctatggagtacagacgtgcgggaattttgcgaagagcagctacaaattctccggcaggaatccctttcagattataatcctgaaccagatccagcagatcacagctattcatgaccgtgcggaattcggaaccatctgcgagtaacgctgtcaggccactcccaggattcagtttcgcaagttgttccacgaccggtttcgtcacagctgtaatttcaaaataacgcagcaacgcttcgtgcacagatgcctgatcgccgtttttactcacggtcacgcgttcatcggcattccatcccatggctgcaatcaattcatctacaagacgcggatgattctcagggaataccccaaggctgtcacctggctcgtaatccaggctggagccttccaaagacaactcaatgtggcgtgtttcacggtccgatcctctgccattcagattgagattctccaacacttcagccttgaatggattcgtgcgatcatattcggattccccgccgctcaccgcagctgtaacagcctcagtggttaccgtactcgcagcagcagatgtactgcttaaggatgccagtacttcattcatccactccgcagctgcttcatcaaaatcaacatcacagtccacacgcggtacaagggctgtaccacccaattcctgcaatcgtttatcgaagtccttacctgtctgacaaaagaactcataggaggtatctcccagagccaacaccgagtaacgaagtccttcaagcttcggagcccgtttgctgttcaggaattcatgcagcggaatcgcattatccggtggttcgccttcgccatgcgtactgacgatgatgaggagattttcaattttcttgagtccgttcggtttgaaatctcccatcgatgacaacgttacctgaagaccttgctcttcaagtttcttggccagctttttcgataggccactggaattcccggtttgtgaaccaaaaagcacggtaacttcccgggatactggcggagcactgacaggtgcaatacctgtagctggtgcagcctgtaccaggttatctggagctgttattgtcgcgcttgcctgaattgctgcaatatatccgctcaaccaagtacgttgtccatcggtcaatgtaggaataagacgattaagcagttcaacttgttcttgattaaaagggctgtttgtcacttgaagttccactgtttgccacctcgcgcattgcttcgattttaattccgactaaaatcatcacattaatttaatttcttctctctaaaacctaacacaccgggtgttgagggtcaatttcaatgattttatagcatttatcagtttcgctgataaaggacaaaaaacaacaaaaaccctccttttcaaatcaaggacggtttttgttttaattttaatttggcggccagctcaagttgaagttgaaagtggaatatagtcactaaaatgatctccaagcactctgcttttatctccgtatactctgtccaagtgattctctccccatagacatatgcggtcaatgatgtcctgtagtgtcaagccgtactctgtcagctcatactctaccttgggcggaatctgaggatgaatgatccgatggatgatttcattcttttccagttcacgcagctgctgggttaagaccttctgggtaatgccaggaatggctctgcgaagttcgcttgttcgttttttacctgatatcagctgatgcagaataagaatcctccattttccaccgaccagttccagcatcgcctgcacaccactctcatattttttcatttcttgttccacttgtactcccccataattcacatatatgtatatccgttattaaaagtaaccgaagaaccccaaagtatctacagcactctcaggtgcgtacttctcaagaagatgtcatgaaacttataataacattggtcagaatgtttaaccaaaataaaaagaaaaaaggatggttactcctacatgaaagttaaactggtcgttactcacccaagacaggattccctaacatttgccgtgatgaatcgttttatagaaggtatgcaggagaattcccatgaaatcgatatcctcgatctatatcatgacggattcgatcccctatatcgtgtagaagatgagcgagactggcaaaatcccgataaacagcatgcccctgtgattcgcaaagagctggatcgtgtgcttgcggctgatgccattgtatttgttttcccgatctggtggtacaacgttccctccatgctcaaagcttatctggacaaggtatggaacatgggtctgctgaacaaggcaaactccaaaaaggcactgtggattgcactagctggaggaacggaggcttcattccataaatacgactattacaacatgatttccaattatctgaataatgggatcgcaggttatgcaagaatgcaggaatcccgagtcgaattcctctatgaaaccatttcagaatccaaagaacatatcgaaggcttgcttgagcaagcatatcaaatcggcaaacattacaattaaaaatttacaaatattacaaataacaattcacagacattacagataacaactgcaaaacgataggaggttactcgttcgttgagtaactgacttttcgcccatgacgggcgtacaatcaagaaggcttactccaacctgggttccaggttaaagtaagccttctttttcacacgctacgattctggtgtaacatcatttcttccataccagtttgctcatcatcgcatataacaacgtagccgattcagctcggctcgcttcggcaagtggtttcacctcaccattgtatccgtgagcgatgcccagatacacaagtaatgccacactatcccgggcataggagcgaatctcggaagcatcgcggaaacgagtaaggttatctgttacagccgtctcggagtcaaccagtccagccgccgcaagtgccctcactgtcaacgtcatcatctcttgacgagtgatcgtcgactctggcaagaagcgcccgtcaccggtaccactggtgacacctagcgaacgtgcagctgtaactgcttcgtagtacggagccttttcgtttacatcagagaacgcattcccggaagaagcattcaaacccagcgcagtcatcaaccattgcatgtattggccgcgggtcatctcctcttttggatgtaactgcgtggaagcaccgcctgcctcagcatcaattacacctctaacagccaaagcctccattgctttcttggcccactgcacttctgcaagatctgcgaatgtctgctccacaggcacaacagcataatttccagtgagtgatgttacagaaaatacaagctgcccgctgtttggatcgtagtaactttgcggcaatggggttgccacaccgttcgcaccaatggcaaatgctacaatccgatcctgctgagcattttgtgaggattggaaaggcagacgaagtattaactcgctttccgatggccatggttgaccatccagttgaagttcaagctggactccatattgcgtgccaagctgatctgcgactgtttttggcagctccgttctgaccaatcggattgatgcaatcccatcaccaactatatcttttgttaacagtgtcgcgggaagctccaacattcccagctctgtaacaatgttgaacacatgtgactcgccctgatctattaacgcagaggcaggcagagatacttcatataccgttgctcccgaaaccggcttcagccgaagttcgaccaagcgctgacccgcatctgttgagggggcaactttaaaagcatctttaatcgttgaaacatccacgttggactgcactacacccttctgatcagactgtccctgcaactccagaacagaacggtccttctccggtttaggttgtggtaccgcattctctgcacttgagttaccacttccggattgtccaccattgctggatgaaccagaaccatttcctggatttccaccggaattgccaccccaaccagggtccgtgcctccaggggaaggaacagatgctggcaccttcactgtcaacggtatagtcagggctctactgtcgtcagaagttcgagtaatttccaactccagtgttactgttgtttccttggatggtgggacaatcgttccatcggtttgaatgaccgacggtaccgaactggaagcgatcttcaccgtgaacccttgcggtacggatggtaacttcagttttttcgcacctgccgaaggctgttccaatgctgtgatgcctgtagctacatcggcagcgctctgctgagccgtgtgcacctgataagcggaagatacacctctcaaggattgccccgtcgcatcaaaagcttccactttgtaataatattctgtgccggggttcagttcactgtccgtgtacttccgtccattgccactgtaaaccaccttatactcacctttttcacgatctgagcggtagagtttgtagcttgctgcaccaagatgagcatcccagtgaagcgttgtgctcgttgaatctaacgcatcagcattaaggccagcactgtcattgacaggtggcgcggcatctggcttaacgatcataatccaactaatcatcgggtcctgcgatgccgtgttgcgtacggtcagctccagcttgttgtccgacacactaatgcctttgtgcgttctcacactggccggtgtaaaagtgactgcacccgtattggtgccattgataaggaaattcgctctgcgcgatgcattcgtccatggatcgttgaatccggcatatacatcgtatgtcccgtttggcacatcaaatgtataggttaagtccgtgcctttaggggaattgctgacatttccaccgttcagataacgtacggtcgagaatatatccccgccattcgaaccggatgccagtgcatctgcgctgacataaccccaattacgtccctcagccggagcgtacatctggtccgccgttcccgggttcgcaagcgttcctttcatataagcacccatgagactataatcagccgtttcgtaacctccgctattcacgaaatagagtgtattctccggaatgacatttacgcgaactgcctgctttttgttgttatattccggtgtcgttacctgtaatgtgagcggtcctggcttggcaaaatcctctgccgtcatggcccggttatcaatcgtccatactgctggcgttgataccagtgctccaccgtcgcgcacattcaatgttgttggcagggatggtactttgcctaacgccacggcttctggcaacggatcagcaatatctaccttgcccatcgaactcagcagatcaggtgtccagctgttataccacttgatcgcgatgtcggagcctattccaaactcaattggcaagaacacgtattttgcagcgtcatttgagaaattgccaccattccatgtatcccccacataaatgaatttgcctttttccggatcgaccggaatgacggaagtggtctgtgtgccaaatgctttgcctggatcaggatcggttggcaacgtgcgcacgaacggattggtctgcgttgaccacgggccaaagatgttgtccgccaccgtcactttgttttcgttaggggcccagccagaagctccggaagtcaaaatataatatttcccctgatacttgaacatcgctggtgcttcgcgttgccctcccgggaacacacgcacgtaatcgacgccgtattccgcctgataggtggaatctcgtaccggattgcctttgtcatccgttcgtccttccttatgccaccctgttacgtcactgtagtcttcattcagtttggagatatagagtgtcaggttttcctcactggagtagatcagatagccagtgccgtcatcgtccttgaacaacgtcatatcacgtgccatgcccttatcgcttgggaagtaatctttctccccttcaggagctctgtccatccggtaactcttctgatacacaaaaggccctgttggagagtcgctgatcgcataaccggcccgcgccttaccgtaattcgcattatcgttataggggtccttgtcgccgtccatgtgggcccacatcacatatttcttcgttttgtcgttgtagatgaccttcggtcgttcaataatccgtcctttgcggatatctgcccagatatccacgcggtcttcacgccccgcatacaatttggagatcaacgggtcattgtcaaaatcatccatggattgaagtgttgttaaagccatgccttcatccttccaattcatcagatccttggatgaatacacacgcacaccaacagctggccagccgcccttatgatattcgccataccagtaataggtctccgtctgttcatcatagaaaaagccagccccatgagcatcaatcggcttcccgtccagatctggccacaattgccccggtgtaatgcttgtacgaatcgtcgcaacaccacgcggtgcggatgctggagaagttacaccgtccacggtcgcctgaatgatgtaaaaatatcctgtgcccatcgttagaccgctatcgttatacgtgttttctttgccactatagacctgctgatatgtacccgtagcgctggttgcacgggacacggtatatgttacatcagatccaggcaggacattccaccccagagagattgatgtatccgtcacagctgtggcggcgaactctgctggagagtcaatggagtacgtcgtggcttctgcaacagtgaatgctgactcacctgctgcattataggccgtcacacgatagctgtagctggtgcccggctcaagtgcattatccgtgaatgtgagccctttaccttcatagatttgctcgtattgctcacttccagcttcggcccgaaccacgcgataaccagttgacttgtccacagcggaccaagatagcttcacgcttgtggcattaggtgcttcggcctttaattcgccaggagcctgtggtgccgccgcaatcgtccgaacttccagaggagcagtccataatgactcggttagacctccatattcataagcaatcttgtaataatacaccgtatccccgcttaatccttcatccgtgtgtcccaaagtcccggtattggttaccagggaataaccgccttcaggcgtagaggaacggtacaagcgataggctgatgcacccgcgatttcagaccattgcagtgaaaccgaagacgccgtctgctcagcaatggagagctgaatatcgttcccagccggttgctcggcaatgatcacgtcatccatatgtaccgactgccacttatttcgaatgccaacaacacctgacccaatggaagaatcgtttaaatcaaataccaaccgatcggagccattttcggcgatatatcctcgaatggtggcacccgacagcactattttgagtgtgtaccacgtatctttggcaaacgcatagtccaccgttttcaacgttgtatcgccgttattcacctttttgctgaagaccaatttgttgttaggtacctgcatttgaaaataataatagttgctcttatcctgaaaccgcggcaatattcccggatatccttgaccggctcccgtgtaaaagcgcatggacacggtcatgtccgacatggagtctccagtagagatgatgccttcattggtatcgctctggaaaagcgtaaagttggacgcatctgtcgggtcagcgaacacttcccagttgcctgagcttacgttccacgcgggtgattccgtgtaattcccatccgaaaaatcgtcctgcaacaatgtggcgggtatactgctcagatcggcatacgccttactcggcagcatcaacggtcccgaagacagcgcaagtgttgctgataacataaatatcatgggtttcctgagtttatccaatgttcattctctcctttggcgtgaaagatgaaagcatggttcttgaatccgcgcggtgttattgctcagcctatcctcagcaaccagtggtcagtaacgagcttttctccacctccttattttaatgaaaccggtttcattggagtgcaaaaaaagacccgtcttcccttctaagtgcaatgatacccatacggaataccgtgttttctttgcccctatgcagtgaaacaggtttttaacatataaatgtaatcgctttcctgaattatattattgccttattcaagctgtcaactgtgaattgtgctcaaacatttttcgttaaaaccacgcaaaaaaggcgcgagttctgcctgttttgcaagcaaaattcgcaccttttctcacgcttcgagcttgttcgcaagctcgcacgtgattcgtaatcaaaagcggactttttgaacaacctctatttagaatactttcgtggtccacgactcacagttccacgtctccgtaacgacatcacggtagaattccggttcgtgggaaatcagaagaatactgcctttgtaggccttgagcgcacgtttcaactcttccttggcatcaacgtccagatggttcgtcggctcatcgagcacaagcaggttggtttcattattgatcagcttacagagacgcactttagctttctcgccaccacttagtacagctaccttgctctcaatgtgctttgtagtcaaaccacattttgcaagtgcagcacgcacctcgaattgggtataggaagggaactcctgccagatctcttcaatacatgtattgtagttggcatccttcatctcttgctggaagtaaccaatctccagatgttcaccacgttgaacggttccttccagagcttgaatttcacccaaaatactgcgcatcagggttgttttaccgattccgttcgcaccaacgagggcaatcttctgtccacgctccatacgcagatccagtggtctggacaacggttcgttgtaaccaattacaagacctttggtttcgaaaatgagcttgccggatgttcttgcatcacggaagttgaactgcggtttcggtttctccttggcgatctcgatgacatccatcttgtcgagtttcttctgtctggacatcgccatattacgtgtagcaacacttgctttgttacgcgctacaaaatccttgaggtcagcaatctcttgttgttggcgcttgtaagccgactccagctgctgttttctcatctcatgcacttcctggaagtgatcataatcgcccacataacgagttagattctggttctccatgtgatagatcaagttgataacactgttcaggaacggaatatcgtgagagatcagaataaaagcattctcatattcctgcaaataacgtttcagccattcgatatgcaattcatccagatagttcgtaggctcatcgagcagcaaaatatcgggtttttctagcagcagcttggcaagcaatactttggtacgctgtccaccactcaggtcattgacgtctttatccagaccgatatccgtcagacccagaccacgtgcggtttcatccactttggcatcgatcatgtagaaatcctggtttgtcagtgtatcctgaatcgtacccacgtcttcaagcagttgttcaagctcctccggtgtaacatcgcccattttgccatacatatcattcatttcctgttccatatcaaacaagtactggaacgcgccgcgaagtacgtcacggatcgattggcctttgttcaatacagcatgctggtccagataaccaacacgcatccgtttggaccactccaccttaccttcatccggctgaagttttcctgtaataatgttcatgaaggtggatttaccttcaccattggccccgatcagaccaatatgttcgcccttcaacaggcggaatgaaacgtcgttaaagatagcacggtcaccaaaaccgtgacttaatttttctacatttaatatgctcattcatgacaccttttctatatagacttaattctttgtatattataagcgttatatcctgcacaactcaacgccatattaaaaattattccacctttttgtctgaaatttgccttatatgaaagtatgggttaaaattttgccttaacgaattactattatatagaacggagctcttcgaagagcatcaggtgaagattatgattgaagtgaaacaatccaagttgggtgatggtggtgagtttaaccgcggggtatttgctaccgttgatattgccaaaggaacgcttatccatcaggcacccgttgtgccttacccaaatgaagatcatgagcatgtcgaaaaaacgattttggaagattacgtgttcgaatatggggcgaatcataccgcaattctgctcggttacggcagtctgatcaaccactcttatgaacctaacgctacttacgatatcaattttgataaccacacctttgacttctacgcgtatacagacatcaaagctggagaagaaatcgtgatcaattacaacggtgaggaagacagtatggacccgttatggttcctggacgattacgaggagcgtatgctggagttcaataagtccaatgatgatgaggttgaaaaagagaccgaaccccagtccctggatacggacacgagtaaataaacgttaaactcaagtaaagttcgcaagcactctattgtatgtgcgaaaagaactcactgtacccggtgaatgatgaaatgagtaactggagacttttcacagtccaaagtttaaacacacaaataagcaagtcctccgttaatggaagacttgcttattcatgttgtcttgctttctaagccagatacacctgttcatgttttattgtttatcgtgcatcttaacttgttttaatccgtaatcggcggatctgtatgcaagtcttgatcgggtgtcgtggatctccacttggtaaaggctacctcgaaccctgcacgctttggtgaacacagaaatggacctgcatgtttgttcgttggataggcaaaccgtgcaacccgaattgtacgccaaggatgctcatctgtgcgagcacgaatgacaacagcctcattactgtaggaggctctgattgttacgattcgtccaccccactctggcacaggagagagtgaccaatcggaatacgtatccgtcacgacggctccaacatgagccacaccatcattgacctcaactccggccttgatccattggtcttctccataccataacatcaatcccgcctgatcatataattcggtgaatgagcttagatcaaacgatacctcaatcgcttccgttccgtcccatggagcaagcatggcatgtccatcccgatgacagaacccgtagaatgtgttctcccagaagtcactgccttcccgagcttccacaacgaaacgatccccatccatccgtgcagcaacgggttccttagtccacttgccttcatgaagcccaataaaatccgatgacatcgttattttcatccttccttccatcccaaaggggagttcatcaccacttcatcacttctaaattaaagaacccagatccgatgcagcagtaggatatgcaaaattcatggtgtttaactgatcgatagtcagattgaactgaatcgccattgcaaaaaggttaatcaattcttctgttttgctcccgagcacatgtgcacccagaatacgcccggttgatttgtcgatcaccactttggccatggcaaatttttcatgagttcgtttgtaagtataccatttcgacatatcatttacctgcacctcgtagccctctttcttggcttgttccgtgctcatacctacagctccaagggcagggacagtaaacacaatggaaggcatcaccttataattaggtttgtgttgatttccctctaacaaattgaacgatacagcccgggattcctgacctgctaacggggttaaaggcaacccttttgtatccgttacatcgccagcagcatacactctcggattactatcactttgcaagtactcgttcaccgtaatcccctttttgctgtagctgacgttggctttctccaattccagcccatccacattaggaacacgcccggctccatgaacgacaagtccgcactgccactggtgatctgcaccattacgtgtgccatgaacgacataggcgttcccctcttgccgtatggacttcacctccgcgttcaagtgaacatgaatgccgatctcttttgatttttgtaacaaagattctacaagctccacatcaaacgacttcagaggctgttcactccgatgcaagatatggacttccgtcccggctctggccgcaatatgcgcaaactcaaatgcaatgtatccgccgcctaccagaactaaacgatccggcaactgttccaaatccagaaagtcatcactatatagaagatgctccgagccctcaatctcaagtggcgcaggtcttgcaccggtagcaatcagaatgtgtttcccatggagcacttcttctccaacttgaatatgattttcatcgacaaatgaagctttaccatggaacgtatccattccggcctgtttgaattgatcttcacttgctctaggtatgctctcggtaaaggtgcgtttaaaggccataagttcagaccagttgatggtcgcctgtccctgaattcctttcccttgcatccgttcattccagtcaatcagctcagccgctccagccagcactttcttgggatcacagccacgcagtgcacacgttccgccgaactcacgttcatcaattacagcaactctccagccagcttcagcgcaacgggtgataacagagcttgccgcgcttcctgttccaattgcaatcaagtcatacgtttcttgtgtcatcatggttcctcctcatccttttggtgcatctattgcagggatgcctgaagttacagcaatccagcctgtttaaggtactctgctgcaacctgttcaggattctctccctctacgttcacgtcatagttcatctgacgcatctcatcatccgtaattttgccagcaagctgattcagcacctcaaccagttgtggatattgatctgccgtttcttgacgaagcatcggcgcaccttgatacggcgggaacaattcctggtcatcctccagcacaacgagttcatactgtctcaactcactatctgtggagtaggcatctaccagattgatatcgccacgttgaacagcaccatagcgaagcttcggttccattgttgcaacgtttgggaattcaatcccatacttcttctgtatgccaaggtatccgtcttcccgatccgagaattcaagtgtgaatcctgcctttatctgctgttcaaccggtttgagatccgaaatggtcttgagattgtattgatctgcgatgctctttggaacggccaacgtatacgtattgttgtaatccattgggttcagcagcaccatgttgaactggcttaacattccgtctcttgcttgttcgtagacctctgttcgatccgtactcacagccgtctccttcataaattcggagatcgctgtccccgtgaattcgggatagatgtcaatatcacccgacttgagtgcattgaaaaggaatggcgttttgcccaatccgggttttagttcaacggtcaggtctgtgtctttttcgattaacaatttgtacatattaatgaggatttcgggttccgcccccaatttcccggaaatgacgagatccttctgaccaccacgtgccacgaagggaatggtaatcacaagtatcgcgattattgccagcgaaccaagggtaaccaatgttttcttaaaggataaccgctggaactgacgcaatagtgcatcaaacaaaatagccagcaaggcagccggaatggctccaagaatgatcagtgccgtatcgttccgatcaatgcccagcaagattaatgcacccaaacctcctgcgccgatcaaggcagcaagtgtcgccgttcctacaataagcaccatcgcggtccgaattccggccataatgacaggcatcgccagtggcagttccactttgattagacgttgccaactattcatgcccatcgcattcgccgcttccaccatggaaggatcaacttcggatatgcctgtgtacgtgttgcggagtaccggaagcagcgcatacaccaccagtgcaatgattgcaggaagtgtgcctatgccgaataacgggatgagcaatccgagaagcgccaaggaaggtatcgtctgcaacacagccgtaaccccaataatcggttcagcgacttttggcttgcgtgtcaggtatatacctagcggaatagcgatgaggacagcaaagaacaatgcgataaatgagatctgaatatgttccagcagagcagacaacaactgacctttgcgctcactgaacacctccgtgaatctactcatgttcttcacctcgttcctgtaactgaccagaccagtatttcatcagatcaactcgactgatctcgccaataatctggcggttacgttcaaccagcagatggtcatgggaagccatgatatcaactaattccgttaacgtaatggatgcaggaacggcagttttagctgattttggcacatgacccggtgagagtggtgacatgatggattcgagatcaaaatcagattgtgaactcgtatcggtgttaggacttccaacaaattcacgtacgaaatcattagctggctgtcggatcagttcttccggggtgcctacctgcaaaacctgtccatccttcataatgcagatgcgatcccccagcttcaacgcttcctgaatatcatgggtgacaaacacaattgtttttttcatctgacgctggatatccaaaatatcatcctgtaatttctcccgactcattggatcgagtgcactgaacggttcatccatcaaaactatctcgggatcggcagcgagtgcacgcaacacaccaattctctgctgttgtcctccggataactcggacggtttacgctcactgtacgtatctccgtgcaaacccaccatgtccagtaacgtatgtacacgctccttaatttgatctgacttccattttcgcagttcaggaacaactgcaatattttcggcaattgtcatatgcgggaatagtgcaatctgttgcagcacatatcctatattccagcgcaattcgtgaatgttgtattcatcgattgggcgttcattaatgcgcactgttccatctgttcgttcaatcaggcgattgatcattttgagcatggtggttttgccacatccactcggaccaatcatgacgaacaattctcccttgttaatgttgaggttaacctgacgcaaagccgttgttccatcaggatattgttttgatacattttcgaactgaatcattcgctctcttcgcccctttatctagggcgtgtttcagacacgccctaacattcatcttcatctatttccccaaaagtgtgttcgtataatcactgctttccttagtgtcccttgttagggagagatccatattcgaatcaacgatgtcaatatgctggtagacatgcaaaaagacgggcactaggcaccgtcttctcataatatgaaaatgtttcttccattatttccatacttccatatgattctgaataaattgctcgaatgaaatcgggttattccccgttaattttttcaccgtatccgtcgtctgatcttctcttccctcctcccggataggcacatccagtcctgcgagggcagcagcgtattcttccgacattcctgtgcgaatcatgctgttcctcaattcatcatcggacaaagattcatgctggatggactgacccagtacacggctcaagacgtctgcaacctgtccataggacaacgtctccggccctgtaataatatgctccgtattatgaggaacaatatccgtcagagcatggaacgcaactgccgcgatatcatctgcactaacaaatccaattttcccttcacccgtagcactgtatattttcccgagttgtttcgtcgtctcccgatgcggtccctccgtaaagttctccataaaataggaaggctgcaatacagcccactcaggagcatgggcttttatatactgatgtactttgccaaaaataggaccatctccatcaattgaagcactgccaagcaagacaaatcgcttaatgccgctccataatgcttccttgatgaacggaatgatggcatcttctgggttcatatccatgactggcatgacaaggtacacctgattcacatttttcagcgccagcgcatatgtctcggaatcataccaatcaaaatagacataattatcggcagaaccagaaagagatggtttagttcttcctgccaaacgcaccggataatgatgcttttgaagtatggccgcaacacggcttcctgtctttccattagctccggtaataagtgtcaacggtttatcattgatcatgcttgtttcctccttcagtttgtttggtgttctttttccagaccaatcggtctataatagtcaaaaaataaacgccttaagcgtccattttcaagaaaacgtaaataattcttactcaaatcatgtaaaacgttaatccaaagcccttagggtcatctgtacaaaatctcgtagcgcttctgcgcttgcaccgctcttcgctgtaaaggtcaatgagagtcgggaataattaagaaaacgggcaagcccgggcaattcttcctcagcgtgcctcaattcgccactcctctggcctcgtaacagcgcagtatggaaaacatcttccatttgttggttagtggtgtgaataaagaccgcgatttcgtgattttgtggtgcctgttcaaccgcgctattaatgatgaaacattcattacgacgttcgttgtctgtcaacacgttaaccgcttcgttgaacaactcggtcacgccttgcctcacacttgtacattcatttaatagtctgattcccgcttctgtcttctgctgaatatagaatttaagagcagagacaaataaatcatgtttagttccgtaggtgtcatacaggctctgcctcgcaatgccaagttcactcagcagtaagctcaaagatgtaccttcataaccgtacgctccaaatacagacgttgcttttcttagcacagtctccgtgtcgaactccttggctcttcccaatttaagacctcacctccctattcattaactaaagaataccttttccagactgatcagtcaagaaaataaatgctttgatttttgccaaagtggtataatgggaatagaagctgaatgaattcttttactatttaccaaccatgaccacatataaaggagtgtacctatatgtatattcaaattacagatttggctgcaaaacgattgacggaaagcctgaatgaccaacctggatatttcaaagtgatctatgacttggaaggttgcggatgtaacggagttatcgctattatcattgttgatgaacttgcggctctcgacgcgcagattgaaaccaatctggttccgttctatgttgatccgaagcagcagctgaaccttgaacaacacatgaagctggatacagaagagaattatccttctttcaaattaagcagtgattctggtgtgctcagcgccaacgttcgcgttcgtgacacccgtgctgtaactgcgggaagctccggtggatctgacgcctgcatgttgtaacacagtctccagcatacttggagtaatctagcattatctctcttcacatcaaaagccgttgcatcttatgcaacggcttttttaacgtgcttttctttatatgcctctatcagagttgcaaaaaagactctataaaagatgaactaaacatttacacgaaacggagaggacagaaaaaacctgaagaaacgaagtgttcgcctaaaagctttctgaaagaaagctgcatcggaagcatatgctatccccggattttcccctataaggggaatttaaaaaatctggggataacagcgatcggaaggttgttttgtcatcgtagtgtccagtgtaaatatctccggtccaacttatatagcaacttgtttacaactcggaaacaattggagaacctatggatataatcctctagtatactcggtatatagattcatatattccgaggaggaacacacatcatgaaaccttttactcgtaaatccatcatatctacaattctcataggctctgttgtagcaggttctgcatttactacgtttcccatcacttcaagcctgaatcctgtcgcgtctgctgcaagctctagcttcactcaatttctgcatgataatgcacctggtcgtacgatcaaaacgattaaaaatgtcgcaactgtgaccaatgtgtccagtacggttgtacttgtcaataaaaagagaaatctgccttcaacttatgcacctcaagatttggttgtacctaatattccttttagcttctcaggttccagtccgaagaaacaaatgcgtaaagtggctgcaaccgcgattgaaaaattatttgcggctgccaaaaaagacggcatcgatatcaaagcggtgtctggctatcgctcttatgcgacccagaaatcgatctttgaccgtaatgccagcatcaaaggtgaagctgttgccaataaaacaagtgctcgaccaggacaaagcgaacatcaaacgggtctagccatggatatctccagcgcttcggccggttacgatcttcagcaaagctttggcaacaccaaagaaggcaaatggctgaaagccaatgcccacaaatacggcttcatcatccgttatggcaaagatcaggagaaattgactggttactcctatgagccatggcatgtacgttatgtaggggtatatattgctggtgagattaccaaccagaaacttacgctggagcagtatttggaacgtgccaaataaggcaagtttgaacccaaagcgtagacagttatgtgattagataaaagaagcgtgactatagataacatgactgaaggagaagatggggccgcaactggccctcttctgcttcaatttttcatttacacacttcatcatgtcccaacgatttttctaaagaccagtggcagtctcttcagaccttctgttccagcccaagagcctactccagcaagtattacattatggcacaaataaagtgcgacattgtacacgatagggcctagaataatctccacgactacaaaacgttttaacgtcgaagattggatcacatatacccgaaattcatgagggtcatgtcctcccatatactttgcgatcaatgctttcatgaatcacctctagtgttttattttagcgtatggcagacaatccttgtcttattctaaaataatacttacataaagtaactaagtgtgttatagtcagtttataaatcatacataagcgagggaaactaccatgagttcgttggagaatctagtcaaaaaccgtagatcggccgttatttttgaagaaggaattgaaatttcggatttggaactgcaagaaatgtttgccctgaacaaatttgcaccatctgcctttaacctgcaacacacgcactatcttgtaattaaagacgaggaacagaaagagaaagtctatgaagcttcccagcaatataaggtaaaaacagcttctgcggtcatcgtggtattgggcgacgtcaacgcgcatcatcatatccgcacgattaacgaaggcctgctgaacctgggcgctcttactccgttccaatacgagcaggaatcccaaagtgtcaccgaattttacgaatctcgcggcagattcttccaacgtgaggatgcgattcgcaatgccagcctgtctgccatgcaattgatgctgatcgctcaggatcgcggttgggacacttgtccaatgattggttttgactcggaagaactgcaacggagtctggaaatccctaaccattacgtaccggttatgctgatcaccatcggcaaaaagtcggaagccaaacagcgcccgcgcggttaccgtaaaccaattaacgaatatgttagcttcaacaaaatgcacgctgagtaacatataaaatgacaaactagttcaatgataaaacaaaaagccacgatctcgtggctttaattcgttcgaataggtttcatcctatcctttaatacgattcatagatgagtctttcagacatttgaagtctgccgtcaaactccgcatatagacaaagtcgaccagcaggagtatcgcttgcgtcataccctactttaaagtgacaccttcctgaaattccacttcagtcataaccaattcattcacatcctcatatggatgggcttctccaatgagttgaagtgtccgctacttcaatgacaggagtgagcacttccatagctgctttggtaggtacacttgctgtaactacaagctctctccccttatacggcacggttacaatataattgatcaacgaaacattgtattgaaaagttccaacccccggcaccacacaatccggttctgtaatcaggttgtccgcatattgaagtctctccaacatgggattttgtttagaatcccgctccgcaagtttattttacgagcagtagagctcttccagttgtttattgtgaatgatgtccagcttcgtgatgcggttattaaaacatcttaaaatttttcaatgctggattatggctgatatccaacgcagttaaatgattatgattacttgatttcgacagaccaaccgggattatccactgtatcaattttcacatcgtatgaatgctcccaatcaccattacagttctcatgataccagttttgaagccattttaatgtgttcatcatctctacctcttcttaggaatctcatctggtctagctggtctaacgctcctggtattgatttaccattaacatgaggtgttggtacattttgttttgttaatttgttgatgtgacccttcccgattagtgatcttgattgtctcaatttttctgctctatataacaaataccaaaacctaaacgaccattcccccgtagaatactgagagaaaattcatttagtgcttatactattagtaacagtctagcttaaactaattttgcatatagagctttatatcaatttatatataaattttaaacgaacaaagttaacttgcacaaattttgttaacattcaaatgttttcaaattaagtagagaaatatatcaaccctatctaagaaaaagtgttaaaatattctaagaataaattatataaatcgaggtgaaagaattttgaagaaaaaaaaagcattttacgcatattctagtagtagttctgaacacataattaaagctatcgcagaaattaatgaagtatctaatgaagtaaacattacatcatgggaagatttttcaatcagtggtaaacccattataactaacattttaaaagcaattgatgaatgtgacttgttcatgtgtgatctgacgtatttgaacaataacgtattgtatgagcttggttatgcaatagctaagaaaaaggctatttggatttcagttaattcaacccatactaatgctgctaccaactataagatgtttaatcttattactggaattgggtattctgtatatcaaaatgcaattgaacttcaatcaattttttattcagatattccttatgaacatacagataagccaaccataattttcaatgatcctgatattaaccgtaatctcttatacttaaagtgtgaggcagggactagttcttctagcttactacatacattagttcaagaaaaatccaagcttccagtaaaaattgacgatctttctgaggcaattcagccactaaattggtaccttaagtttctccctcattcatttggagtgattatacatttccataaacaaaatagtgaaattgaaggagagcatgatttggcgcgaaaatcaatgatagcaggtcttgcaaaaggacttaaaattccttttatattacttgctcatcatccttttgtagctcctcttgattatcatgaagatgttaaaactcactccactccatctcagtgtgaagagattgctagagagtggttgtcacctttaattgatgaataccaaactatggtggacgaacataaaaccttcaaagctgaccagtctgcagttggtcagttgaacaacctaatagttggcgactatgtagcagaaaatgagtcaaaagatttaacagaatattttctcgaaactgcagaatataatgaagcactaaaagcccaacaaatattattcgttggacgaaagggaactgggaaaacagcaaatttaataaaacttaagaagactctatctgatgacagaaggaattttgtagtgtctattcagccacaaggtcatgagtttgagggtgtccttgatattatggaacaacttcgtgctaactcagagcaaggaaattttattgagagtatttggaaataccttatatatactgaaatttcaaaacaatactatgaatggctggatagtcagcctttacattacgagaagacaaaggcagaagaagagtttgaattatatgttagtaacaattctcgaattataaatgcagatttcacattgagattagaaaatgcagttaaggaactaaaaaaagttaacgtcggagacagtattgatgagcaacgaaaaaaaataagcgaatacttacactctagtatgcttacacaactaagaagacacttaggttctacccttcaaagaaaggaaggtgtaaaaatattaattgataatttagataaaggttggaatgatagtgcaaatcttagtagtttaagcgatttattattaggattgcttaatgttgttcaaaaaatcacttctgaattccaaagaaacacttataaacatgagcctgtaaatgtatcattaatcgtattcttaagaagtgatatcttctcaagagtaatgagcttaacacccgagcgggataaaatcgcaactaaacatctagattggacggattcacaactattatttcgagtaattgaaaaaagaattaattatagtagtaatggaattactagcccagattcattctggaatgactacttttgcagtacagtaaaaggaaaaccgctaagaaagtatatacaagaattaattataccacgaccgcgagacatcatattcttatttaaaatggcacttcaagaggctttaaacaataaccatagcaaggtaactgaagcagatttcattgcggcagaatatgcatattctgagtatgcatttagttctttgcttcctgagaatggaaagagaataagaaacttagaagctattctttttgaatttgcagggcaatttgaaataatcaaccatgaggaactattgcattgtattactatggctacggaagctcctaatgaattaatagagatattatgtgaaataacttttatcggtcaggagacaatgcccaataaatttgaatttttcagtgagaagagaccttcccaaattactaataagctagctcagaaatttgctgagcgctcaggtaaacctaaaaggtataaaattaatcctgcatttcatgaatatttaggaatatcaaaagaataaaccatattttggtctttcaccttatatcataaaatataagtgagtgtttcgttaaacggccgaaacaacttgttaaaatttgaactttactcctttattagctatgtcttacaaagtaataaattcagttttcaaggtgattcttaagtagtaccataatgaacggcaaaatataagccacaggtcacctcaataaaaatattataacttgctaaatcctagtctctgacagaaatcgcgaaggtattattccatgtaatttttgatgagtgtcttttatcttaacttttgatgcaaggagccctactaaaagatgaaaaaaccaaccattttttttagccattctagtaaagataaggaaccaatgcttgaaatcaaaaccaaattggattccattactggtggagtactggatattttcctttcaagcgatggtgaaagcatcccctttggaagtaactgggtacacaaaattgaagacggtttaaagcacgcttcagtgatgtttgtgtttgtgagccctaattcaatttctagtagttggatctattttgaagcaggttttgcatactcaaaaagtattgatgttatccctgtaggaattggcattgatgtagcccttttaaaagcacctttaagcttactccaaggattcaacattacttcaggtgatgggcttaataattttatttcagtaataaacaaaaagttcgaatatcgctttaaagagagtttttcagatgttgattatgcgaatatgcttgcttatcagaatggatcgtctgtatttgatttgcgagatgtttttaatacgattcattatgaattgctaacagagtacggggatgggaacggcggaaaagttacatataacgtcgaattgtatttcgagaacataaaacaataccttattacgcacaatctaaggtacgcatacgccccgaataaagataagttaactattctagtgtatggaatcaaaataatctacacaattgggaaaaagcaagatgagaaaggttccatatatcaaagtgaactgggtaaagttacttttattatttctccttataatttcgagaaatcattcaatctgtttttggaactctctcagttattttcggaaaaagactggatttaccttaaattcggtactaaacaaggatattctttcataacgcaagacgagcatctagcttctgtcttctctatgtatccagatgagttcggatttgctgaggatcgtgttggagtctttacttatcttgataaagatatgaggttcataatatatgaccaaaataataggacttcgagagaaagaaaatatattcttaatttatcctttaatcctcataatatagtctaccgtgatattcagaatttcttatattcgttagttcaaaaagaggtaattcataatcttaatcagaaataatattaaataattggctttttagtagcagcacaacacatagaataatttttttgacaatattctaaactaaggggtgatttatggatattctacaagaagagtatatcagccggagattagagggacaaatcaattggtatgaccgtatgagtatgtcttgccagagtaaatataaatggtggaaagttggagaaattgttgcagctactcttataccagttttaacaagcttaacaaccaacaatcagtggattgtgattataattggtgtgttgggcgcaggtatagcatttgtggagggccttttaagtttgcaaaaataccatgaaaattggattgaatatagaagtgtatgtgaaacacttcgtcaagaaaagtatatgtttcttactaggaccggaatttatagcgtttcagagactccatttcaactattggtcgaacgggttgagagtgttgtttctaaagaaaatgttaattgggccaatttgcattctaatgaacaaagaagtcaataccagaaaccaacaaattctactcagattgatttgacggatccatgatatcatggaaaacttctattttacgtagttttcatgagaaaatataggctccaaaatttgaagatttactaaaaggcgggccttatctggctagataaataacaggtacttctaattatttgttgcttcctactctcattcgattccggtatggtatctaatcgcctttctagcatcatatgttaattaaaaacgtacttgttagagtacgtcgttactcaaactaaaacgtgtaattcttttagtaatgcttcagcaaacttgataatatcttcttgctgttcatccgttgcattttccattactgctgtacatgcaggctgcagatttaataagaaaaggatatgtattccgattgcccgtgctattacctgatgcttctcaatttcatccaaacattcttacagataaatgcttctgtaccatttacatacagctgcaatccccaggacaactcccttaggcagatcgattggatctttcataatcagaattccttcacctgtggcaatgctaaacaagtcacctgatttatattggttgaccaacgccaacgctttatccagtatatatgatgttatcataatatcccgctccctatgatcaatgtggcttttatttatagtactaaaggatcttgtgaataatgattgaagttttaaacgcataatttatctctcgcctacaaggactattttattaaatctgactacactattaaacatattcctgtccagataaacacctattcgttaggacacccccccttctatcgagacgacatcaataacaaaatggtattggtacatacataaaatccttacagaatgcaggttattaaattttgatcttccaacttttctgcatacgaaaatggatagacaaaaaaaaagaacctactacagtaaataggaacttagaactataaatttaatattatgtactctctctctaacatctaacgttacagaaacttgactgatacttatttagaagaagtactttttgaaacgattgaagaagattggttctactatattgtaagggttgatgtgtttcacggcgctggtggagcaacaaatttagaatatatactagattgcttcaaagattggtcttcaaatcaggagtaaaacgaattccctccaggttcacacagcttgtaatgtccaggtaggatattaattgctagcgcttatattagcgcattttggaatgtaatcaattggagcgaggtaaataagcattacgaattggcaatcaaacaaagcattgattccaacttcatcatttcataaattcaagtcttcaactatgctgctaagcgtatgaccaaaaggagaagagcaacctcattagagattgctcttctcctttttcactactcatattagaaattaaaatgcccagttgcctttgcggaacaccggttcgatcgtaccatcctgtaactcaccatcgatatccaactcagcggaaccgatcatgaaatcaacgtgagtcaagctcacattgcattcatgcttcagcaactcttcgttagacatcgttgtgccatctttcatgttgaatggatacgcacttcccacagccaaatggcaggatgcattttcgtcaatacccgtattgtagaaaatgcgattcaggttggagattggggagtcatgtggtacgagtgcgacctcacccagataacgtgctccttcatcggtggcaaacaggttcttcaaatgctcttcaccggatgctgccgtaaacgctacaacctgtccatccttgaatgtgattctcatctggtctacaagttgtccgttcaggttcaaaggcatggtactgctgacatatccattcactccgctgcgtttaggcatggtgaatacttcttcagttggcatattggcaacggtgtatacaccttgtttattttcgctaccaccgccaccccagatgtggttgtggaccaattcaattttcaaatctgtacctggcgcacggtaatgcaggctcttatagttctttttattcaggagatcactcatggtattcagggtatccagatgttctctccaattttgtacggcgtctccgccatctacacggttcattttgaagatcgtttcccacatcacgttgattcggtcttcttccgggatgtcggcaaatactttgttcgcccaggccttggtcggtgctttgatcagacaccagctaatttcatggttgcgtgtgtatttggcatatccgcgacgtgcgtgtgcagctgccttggtagcacgggaaacgctgtcggagtcaattccgttatacagttcaggatctggaactttgatcgtcagggtagcgccgcctgcttctgcaaacttctccatcatatccgctttccacgctggataatagtcaaagctgtcattggaaccatgctcaaaacgactgcgggtaatgttgtcgtcatcgaagtccacctgtacatagtttgcaccagccgcataggctttttgcacaatcagacgtgtgaattcaagcgtttcgatgggggcagtgacgagcagatcctgtcctttttgaatattcacgccaactttaacaactagttctgcgtattgttccaatgacttttcaaaggtctgttcaaattgactcatggttgtgttcactcctgtttcatatattatggcatggtttgcaaacttgggatctgttgagtggccgttacagcgaaggatcgttctttagatcgtcgttgtctccaaattttcttcatcgtatttttcaaaggttaaaattcggagacaaatacgaccgctttcgcttctacagaatcgattccttctctttcactacgcaggcacaatccccaaaatttcatctatacaaatgatctaaccattacgtttttcttgttcgcgcagttcgatccggcggattttaccagagttggtctttggcagatccgtaacaaattcgatcttacgtggatatttataaggtgctgtaatttccttgacgtggtgttgcagttcacgcatcagttccggtgaagccagtgaatcgtctctcaacacgacaaaagctttgacaatattgccacggatctcatccggacttgcaaccaccgcacattccttcacactcgcgtgtttcataagtgcttcttccacttcaaatggtccaatcgtataacccgaactgatgatgatatcgtcactgcgaccttcaaaccagaagtatccttcttcgtctttgcgtgcacggtcccctgttacaaaataatcgccacgctgactcgcttccttccgtccctcatcctgataataggaccggaacaaagctggcatctctttgtgtaccgcgatatctcctacttcacccggaggcacaggttgtccctcatcgtcaataatttcaatcaatccaggtgtaatcgactgacccatggagccaatgcgtacaggcgcatctttgagactgccgattaacaacgtgctctcggtctgtccatatccgtctcgaatagtcaggtcgaagtgacgctggaagatttcaatgacttcctgattgagcggttcacccgctgaaacagcactgcgcagatgggacaggtcataatgtccaagatcatcggctttggccatcaaccgatattccgttggtgtacagcaaaggacattaatttgatgttcttgcatcagttccaggtaacgcttgggctggaatgatccattgtagacaagtccagtcgcgcctcttccgagtaccgacaggaacggactccagatccatttttgccagccaggtgcagccgttgcccatacggtatctgaaggttggatatccagccataatgaagaagcgatccgcaggtgggcatatccccaaccgtggctatgtacaactcctttgggattacctgttgtgcccgaagtataagcaaggatagccgtatcatcacgatgagtctccaccgcagccatctcatcgggttgattctgcattaactgatgcacattgacccaaccttcagcaggtacgctaacttcttcattcggtgatgccacgatgcgatgtgccagtgacggcagatccgcgtccatcttttccacttccgaggtcgtctcggaccatacaataacagcccgcgcctcagagtgacgcagacgatattccagatcttttgcccgtaacatctcggaggaaggaataacggcaatccccaatttcagacaagcaatataaatgacataggcaataatacggcgtggtaccatgaccaacacccgatcacccttctctagtccaagttcacgcagacctccagcaagacgattcgcctgcttgaataaatcaccatacgtgatctcttccacctctcgttgatcgctgagccatctaagtgcaatccgctctgatggatgattctccatctcggatgtcaggttatagctttcaggcgaaatccactgttcaaagttcaaatggagcctctccttcgtagttcaattgtaaagcttctatatattataccctaaatcctaggaccaggtgctatgaactaggttcattctgaaaaaaataaacataggtcaattaatgaactattataatagatcttatcctataatgaaaatgacatatacaaaatggcgccttcctgattgatcaggtaggcgccattttcattcttcacttatattacattagttttccctaactataattttcacacagtccagactgtgtattttaccacggataattacccattccgtccaaaatgctttcgatctcattcaactcttccgttgtcagatccggtgcctggagggcagcgacattttcttcaatctgggacacacggcttgcaccaattaatgcagaggttacacggttaccacgcaaaatccagttcagagccagttgggagatcgtctgccctcttcgctcggcaactgcctgaagcgcatcgaacttggcaatccgttcgtctgtatatgcttcttttttcaaattgcctgttggattggcgcgttcttccttgatcttgtcgacatatttattcgtcaactgaccgcggccgagtggacagaacgctatggagcctacgccctgctcatccagtacgtcttgcagaccgtcttcaatccagcgattcagcatcgagtagtttggctgatgaaccagacatggcgtacccagacgacgaagaatggttaccgcttcttgcgtctgttctgcattataattggacaaacctacatacagtgctttaccttgtcgcacgatatgatccaatgccgtcatcgtttcttccaatggtgtatccggatctggacggtgatgatagaaaatgtccacataatccagtcccatccgaccaagactttgatcgagactggcaatcaggtttttgcgggaaccccactcaccataaggcccactccacatatggtaaccggccttcgatgagatgagcagttcatcccggtaaggacgaagatgttttttgtaaatcacgccaaagttctcttccgctgatcctggaggtggaccatagttattcgccagatcgaaatggttaattccgaggtcaaaggcacgcaaaatcatttcttcctgaatatccaatgtacggttgccaccaaagttctgccatagacccagcgcaatttgcggaagtctgattccggatttgccggaacgtacatatttcatctcatcatatcgttgttcactcgcagtatagggcatcgttattctcactttcctgtaaggtttgttgaattccttttcatcttagacattttcctggctaaacgatatggcatttcactttgaacatatggaataatgattgttatctatatatactaatgttaaataattaatctttttagctatttagtatgttaaaatgcaagatgagacaaaatcgtacaggagtgaatacccttgattacgtatatgttcaaaaacaatcattttcaggagctacagctccttcattatggtacggaagcctgtacaccaggccaccactttggcccagccatgagagactattacaaaattcattatattctgaatggcaaaggtaccttcgaagttggtggcaaaacgtataccctgtacaaaggtcaaggatttctgatcgttccgcattccgtcgtgcattacgaagcagatcaggatgacccatgggaatacagctgggttgcttttcaaggcagcaatagtccatcctttttacagcaggcctgtctgtccgagcatcacccgatttttgagttgggtaatgaggatgacgagatgcgatcctgcctgcaccgaatgatcaattcccgcaatacccataaaggctgggagattagcatgactggtttgttgtatcaattcttctctattttgattgatcaggctaattccgagcatcttcaacccatgccggattattcgaaggaaacgtacgttacgcaggtaatggacttcattgaaatgaactatgccaatgccgttaccgttcagtccatcgcggcccatgtcggtttacagcgcagttacctgtgctctctcttcaaggaccagatgggaagcagcatccagtcgtatctggttcattaccggatgcgcagggctgccgaattgacccttgatcccggcctgaccattggtgatattgcccgttctgtgggctatacggatcaattgcttttctccaaaatgttcaaaaaagtgatgggtgaagcgcccacctactaccgcaaacataaaacagcaccctcccagttaagttgttaattgggaaggtgctgtttgtgccaatcgtttatccttacagtcgtgattccttacattctatacgttggtttataccgtctccggcatggatatgccaacaacttgcactttgatttcatcgaccataacgccggctaattgttctacagcctgttgaacattatgttgaagttcacggcagacctcgtgcatcttgttgccatattgaatattgatgcgcagctggatggttgcctgatcgtctttgacgtgtacgtcaatccctttttgcaggctcttgccgctgatactcttggcaatcccttcagtcagtccaaccgacatggaggatacaccagccgttgattgagcggccattcccacgatcttggataacacatcgttcgagatgtgaatggtacccatttgaacagattgaggtgcgatatattcaggttcattgtattgtttttcgataatttcagacatgtgctccactccttcgaataattaaattctatgcattctgccatttgtccttaaagaacatgttatagattcgaaccaaaagaatttttacgatcatataaaccgggataataatcaggatggcaataattccacccaggtcgcctgcacccaacaccagaatgatggtcgtgagcgggtgaatatccagctttttgccgaatacgtacggtgcaaccaggttgtcctgaatctgctgagcaacaagaataataatcagagaccagatggcaactgatggtgataccacgagacccatgatcacaataggtacggacgacacaatcgctccgatgaatggaacaaagttcatgatgaccgcaattaccgtgagaagtaatgcgtacggcagtccaatgatcaagaaaccgatatacatcagtacacccagcgccagattcaccaaaactcttcccacaataaaaccactcaacgcctgatcaatctcaattacgacttcacggctgtccttttggaagcgttttggagcgatatgtgccaatttacgaccaaatttctcgccttgtaacagcatatagaacaaaaggatcggtagtgtaaacaagatgatcgcaaaactggaaacgagtgagaaaaatccacttacatagttagttacaaagttaaatcctttgttgatatactccgtgatctgggagaaaggtgtcgagccctcagggaacaaggcctgaatggcaccattttgctccagctctctcagctgttcacttaatgaattaattaaacttggtgcgttatcaaccagattgatcagttgctcacgtaacgatggccataaaccaatgatgaagaacactcccagaatagcaataaccagatagattagcaaaatacttagcgtgcgatttattttctttttctccatataattcacaagcggccttagcagataataaaagaacaccgacaacatcattggcacggtaatgaccgtgatcatggtgacgagcggctgaaagatgaagcttacacgtgataataaatagatattaaccaatatcagcgccagtgcaatactgaaccggacaaacgtatttactttgaacaaaatatttccccccacatggacatttcttctcttatttaatttggaatctcaatggtaaacacggtggtctctcgcccacgccgggaaaggatcagccgtccgcccattttctccgtattacgtcgtgcgatggacaaaccaagtccggtgcctccggtcgctgtccgcgcctcatcccctcgtacaaacgggtcaaagatcgttgaccatagttcttgaggtatgcccactccgttatctgccacctctatcaccacatgggtatgaagcggaatgagttcgacccgcagttcggtcccgattggattataagacagagcattggtaatcagattctggatgactctggataacagctccggatcgtacctcgcgtagatcacctcatcaggaacaagtacatgaaggacaaactgtttctgttcaatctccccataagtatctgccataatttcgcgcacgaattctccaatctctcttctctgaatatgcatgcgaaaatcgggcgaatccaccttgagcagctccagcatattctgtatcatgcgtgcaacttgaacggatttgttatagatgtatcccagatatctttgctgcctgtccttgtcctccccacgtccttccaccaatgcctgcgcatatccctgtatagatgttatcggtgtcttcagatcatgtgataagtctacaatcagtcgctgtttgctctcttcggcgtaacgtttctccgcagaagtgttctcaatgacgtccgccatgtagttgaaggtctcacctatctggacaaattccctctcggctgagatcgacatacgtgtactataatttccttgtatcatctgcgtaagacccgaggagaggatactgagtggttttttgattctccgtgcgacccagtagctgtagacaaagatcaataataaaaccaaaccgatgccaatcataatgtaaaaggataatggatgtttcagattagtaatcaactgattatcattaattcgcacgctgaccagatcacgtgggattttgagcaatacatacgctgccgctccttctgtcgagagaggagtgatcgaataatagtattcctggtcactccgattttccagtccatcatatagatcagcttcactgtattgcgtgatcgcatcttgcttgtctcccacatgatgaatgacattgcgattcgcatccagaatttcaatccagcccccgctatccttgagacgttgaatctctgtgtctttgcctttcgacaccgaacctccaccggaataaaattcgttctccagctcctccacatacatgtgggcttcaacattcagattcgggtctaccacctgatccgaaatgcgaaaatccacgacatcaagtgaaaccataaggtacacaatcaataccagtaacagcaaaaagaagttgaacagcaagaagtccaaagtcagggatgtctgcaacagtcgcttttctctagctttccatgggcgcttcaattttgtatccaagtccccttatcgttttgagatattccggttgtctggagtcacgctcgatcttctcccgaatgttgctgatatgtaccataatcgtgctgtcctcgtgcgcataatagtcgccccagaccgcttcgtatatttttttacgggtgaacactcggccaggttgatcaagcaacaattccataattttatactctgtagaggtcaatgttacaggacttcctgaacgaaaaaggatacattgggatcgatccagcgtcagctcacctaataccagattctgttctttcgcttcggggatctccgctgcatcaaattgattaactcttctgagcaacgcctctactctggcgacaatctcaagcgggttgaacggcttcgatatataatcgtctgccccaagtccaagtccaaggattttatcgtgatcctgacttttagcggataggaacagtacaggcatgtgatatgtggctctgatctgtttgatcaactgcaatccatccattacaggcatcatgatgtccagtatgaccagatcgatctgtgttgaacgtatgctttgtaatgcctcggctccattcaccgcagttttaatggtatagtccttctccagatatagttgaagcagttcaacaatctctggttcgtcatctgcaattaatacggtgtatctcatgttattcctctcatttcctatactctatgcctatctctacattattactatatactacgtctcttaattcaacctaaatcatttctaaagataatctaaataaatagaaatagagccctggctcagaccaaggcattaactaaaatagggctgttttcagcctacattcaaacttttcgttcttcattcaggcttttcaatcttagatcaacagctcagtccttaagcgagcgtagccacggctccacttttccgaataaacgttccttgtcatactgcacatattggttcgcccgattgcgcacgggatcacccgcgtagaaacgttcatatagatcatgccttgctccgagtggacttccggtcagctcccatgcgagttgaaagagtcgaatcttctccggggcttgcatcgttactccaccaagatatttgccaatcatggaacccatcatttcattcatctcaatcgtaccagaaggaatctgaatcagaccacccgcagcagtggtcttcaaaatctccaccgcgcggggataatagcgattgcccagattacgtgcggtttcaatatatttgaattccggcagccagttgccaaatgcgtccggcttggactgtgcttcagcagcaataatcagtccctcgatagtctgcatctgactgatcagctctccaagttgttcctgcacattcaggaaagagtccaccccaatctccttggcaatggatgaggtcacggctgtaataaactccagtttcgagtgtaatcgaatgacactctgatggtaggccagactggccgaagctgtattgcagcgaatctgccatacggcttcagggttattgtgcagtaatacacgttcccagggcacaaatacatcgtcaaaaaataatacagcatccatctcatcatactgcgcactgagtggatgtgatttatctgtattttttgtggcaaaagattcacgacacatcatgtgcaagcccggactgtccgcggctacaattaccatatgggccagctctggcaggtggcctggaattcgttgaacgggataagcaatgatatcatcggcataaggcgcggctgttgccaccattttggccccgcgtatcacaacgccctctgtattccttttgacaattcgcagcatggcatcctcatcttcaccaacaggcaaggaacgattaatctgcgggtcacgctggacaattgtcaggaatgcatcgtttcgtttggcttgtgcaaaataatccgatattttgtctgcaaatgccgggtcatgtgatgtcatttcatgtcgtgttgcataccaaccggtcagcctggatcgggcataatcagacaatcggctcatcaccccatacgtccgatcggcccacagccgaaaagcatccgccctgctgtttacgtcaggaagtgaacgaggcacaagaaaagagcgatgcacgtaacttcccgtctgttcgtcccaataggccacggtttcccttgtcaccgggtcatccaccagattgaacaatccttctatggtttgaagtgttccctgaaaggcctgatgcccagttacctggatacgctctccgtccagccatacattccgctcatcattcagccgttgaatgtaagcttgtccacgagacatcgtgatactcatgatatgtcctccctctcaggcaccggcctgacatttctgtaactccatccttctaactgcttgagaaactatgtaatgatacattctgtatctaatgaaatagtactgtgccttagctagaaaagtcaacagacaccgagcgatcagtccggtgtctgttgggccatgctattttagactaatttggaatacatgtgacgcagataccgccagcgcacgagtgcaaaatacaaaatctgcatggaagcaaataccaagaagatgcgcaggctgtatccaaagaccgagaaatcaaccagttgctgcaacgccacaaaggcaaccgaactgtggatgaccgccaccagaatcggcaggaagaacataagcaatagctgccttgttacgatcttacggagttcgggacgactcagtcccattttgccaatcatgcgatactgcgcttcatcccgttctagatctgcgtaaagtctgaaatacgtgaaacttgctgcaaaggtgaagaaaacaatgccgatcaggccgctcaaaattagaatgatgccattggtctgcttggaattaagccaatccaccacaagcgcgctgacctcgtaataacctttttcggaatgatcatcttgaatggatttgatcaattcaggagcaaagctgcgtgtacccatccaatctttcacgataaattgtatcgttcgactcgaatagaaaccttcaggcatgccaacttcctcgttgtacgcaggtctcatcttattaaataattcgtcggttacgacgtagagataaatttcatattgaaaaggaattacaatatcggtaccaggtgtcgatagctggacaggtacgtgctgattatcaacctccagattgacctttcctcccgagactcctttttcaacctgttcacggtactccttgcgcatcgccaaattgcttggtgtcataaatgactcatcgatttgtttcaacgtacgttcttcataccccagtgccttcgcaagacggttataatcactcagtttgataatcttcccattattattttcacctataggagcataactgcccttcacgtagggaacttgatgatcaatcaacgtttcttcaatctgccgaatatgtcgctcggagttgggagtatcccagttattcatataactgaatgcgtacggattcgacatggacgacaaccccgggtcagcaatagcaagcatggtgccaattcccgtaaatgaagaagccgagatgatacttaccatgaaaaacatgatggcgttatctttcattcgataggtaagttcagataggaagagcagattggttttacggaaaaacaaccttggatttcttttcagtgcccgaatgatgtatacactgagctgtgtgaacaggaagtacgtacctgcaataacaaccacgacacttgcaagtaataacggaaaggagaagcttatccatacaaaagtgaatactcctgcataacccccgccaattaacaataccgataacaaggcgagcagacgtgatgctttgggttccggtttcggtttttcctctgatttcacaaggtcaatgagagttcctttgcggatgagcaaggatgatgacatcgcgatcacaacaaacagcagcagaaatgcacctgccgtcagggcaatgctttttagcggaaaatagaatcgaaggctgttctcaacagccagcatggagccacagatcagcagaatcaatttgccgaaaataattccgagtccgatcccggtaatgatggaagctaatccgatacacatgttctccataaacagaagccggttcatctgtttacgtgtcatgccaatgatcaggaaaataccaaattccttcttgcgcgtcttcaggaatgaaccaacggaatagagcaggaacaggaatgaaaagatgaatataatgatctctgcaatcataaacccctgattcgcaagcaacgtaaccgtcccacttgatccctttaagcccgctttcaagtcgggatggaacaggagcaatgcgtaagtaaaaaagatcataacagaaaatgtactgctcagaaaatgagccagataaattcgtttgttgcgaacaacgttattaatggcgaactggcgaaaattcatgtcctgaacctcccattagggataatacattaataatcttctggtaaaaggctgcgcgattatcgccgtagtgaatctcattatacagtttgccatccttgataaagacaacccgactgcaataacttgcagctactgcatcatgagtgaccagcagcatcgtagcctgatcctcctgattgcgcgtttcgagaatctccatcacatctcttgccgccttcgaatccaggttgcctgttggttcatcggccagaatcagcttcggggaatggataagcgctctggcaatggccgtacgctgtgcctgtcctcctgatatctcatatgtccgtttgttcagaataccttcgatccccagcttgcttgccagctgttcaacacgagtgttcatctctgctagcgaaacaccgtcaagagtcagtggcagcacaatgttttccttgactgtcagggtatttaacagattgaacgattgaaaaacaaatccaagctctttgcgccggaacagcgcgagttcgtcctgattcaattcaaacggattcttccctgcaatccgcagttcgcctgatgttggatgatcaatggttgagatcatgttcagcagtgttgttttgccactaccggatggtcccatgatgccaacaaactcaccttcctgaatactgaggtcaatacctgataacgcttcataagatacgatgcctttgtagattttactgatctgtttcacagaacaaatctccatggttacaactccttagtgatgtatgaattcaaaatcaagttacattcatgctgtgtgcatgtgtattgtgcgtggcctttcctgtactcttctgactacagtctatcgaagttttggccattctcctatggtttaacctttcaccaacatgacaatgttgtaaggttgcatcatgaaaatcaaaaagacgccttcgccccgatcaggcaatagacgtctatacttacacttacactgtaatatatactccactcacactttttcaacaaaaatacagacctcacgtcccaatcttatcttcaacctgtcacttcaagagttgaatgtaattcggacagtcgttccttcgccgtacacagattcaagatcaatccgatgattcatccgtgttaacacttctttggcaatatacagccccatgcctgtggactctttgaaatgccgcccgttctccccggtgaagaaaggttggaatacccggtttagatcagacttcggaatcccgatgccctgatcctgcacttccaacatgatagagcgttccgcttcatatgcacgcacatagatcttctgcccgttgcccgcggagtacttgattgcgttcgacagtaactgtaccaggacaaaccgaatccacttggcatcggattgtacaaccaacgaaggttctatatgcatctctggatagacgtgattgcgaataaagaatcgcttgagttcatggatcgcctcttccccagcggtcctcagtatcacgggttccacactgaaatcctgctcgaaggtatccaacctggccacatacagcacagtctccaaacctcgcctcatctggtccgcttcctcccgaatgcttacgagccgaggatcatcatcttcctgaccttccacggtcaactcaatgacggataacggtgtcttcatctgatggacccactggttcatgaacgtcagatattcttgctgccgttgttccagccgatgaagatgagcatgatactggccgtattgtgaatccaacaacttctccagcgccagtgataaaggacttgtttcgttcaagggtacaaattccttcagcgaatccatcgaccgtgacatccgggtataaaaggagcgatgtgaataataacgatacaccaaatatccgatgtataaaaataatcccaacgctacggcataagcagccgtgacccaatcgttgtaaccgtcataccagaacaccgcaacaacggtgaacaagatggcaacaacccagcacgttaaagcgagatgttctcgtataaacaatctcatgatggtgaagcggccttccaggtattgttcaatcggtaacccgaacctctgaccgtttccagtgcgtccgtaataccaagttcggctaatcgtttacgcacccgagtaacgtttacgctgagtgtattgtcatccacaaaagagtcatcccacagcttctccaagattgtctctctgctcaccagcttgggactgcggcggagtaacgtttccagcagaatcgtttccttcttcgtcagctgtactttgcgatcaccaagctgaatctccagtctttccaagtacacgaccaaaccgtccagttccaccttgcgttcttcatcacgagcagcatagtccccatatacccggcgcagctgacttcgaatttttgctataacaatctcatgctcaaatggcttcgtaatataatcatccgccccgttctccagtgccatgacctgatccatcttcccactccgtgcggagataaacaaaatggggcatgtagacagcgtacgaatctggcggcaccaatagaaaccatcgtaactgggcaagttgatatccagaagtaccacatgtggctgtacctgctcaaactgttgcacaatcatctcaaaatcctcgaccagtacggcccggtccccgtagcgttcaatatgtgatttcaataatcccgcaatcttgggatcgtcctctattatcataatggtatacattattggatctcacctctggcaaaatcataacacaggatttattatctagcatcgatttgcttacgccaatccacaatatctgcattcaattgcttcaggtctccggaagctttctgatcatcggataacttgtattgttgcttcaatgccaggatacgatatacactttcatcaattcgggactcggtgattttgcctgactttactgcacttattagcgtatcaaaaatcgtcttggcactctcataactgtgagctaccaacagaatgtcacttccagctttgacagttgctagggctgcctggtccaacttgtagttcttcgcgattgcacccatactcaggtcatctgtgatgacgacaccatcataattgaacttcccgcgcaaatgttcacctataatgacatccgataaggaagccggatgatccgggtccagcttcgggaacaaaatgtgtgcaaccatgaccgcctctacctgctccttcactgcggcctggaacggaatccattcaagcttggccagttgtttttccgttttattcacgacagggagatcgagatgggagtccacggacgtatcaccatgacccggaaaatgtttcactaccggaataatgccttcactacgtaatcccttcatctctgcaatccccatacgtgacaccagttctgccgagctgccgaatgaacgatctccaatcaccgggttcttcgggttactgttcacatccagtacaggcgcgaagtccatattaaaacccgcaagctgaacctgtctcgccaacaattcgcccatcgtttcagcaagcgcgctgtctttcgtctcgcctacttttctactggaaggaatggattccaccgtctctggcatacgactgactttgccgccctcctgatccacactcatgaagatcggtaccgggttggactgatttacttccttgatggattgtacaaacttggctgttccctcaagtgtcgatacattgttggcatagaaaataatgccccctaccttttgatccgtaatcatctgtttggtttgattatccaacgttgtcccttgaacaccggccagtatcatctgtccaatcttctcttctaacgttaatgaactgagttgctcctgcaccggatcgacttcttcttgcggttcctcttgcacttcttcctgcggtggaacggtattctgctccggcgatgaggaagattgccctgagttagagccagcgttcgatccggtattcgagtccgttgaggaggaaggtttctgtgcttggccacatgccgataaaagcagaacgatccccagcagaagacacatcatatgcagtggttttctccatttattgttcgagttgtacctatagttgtgcaaggatattcatcctccttatgtaatgtcatcttggcaacccttgggttcaggcctaaccttatcataaggtggtggattttcaaaatgagcacttctgaggattgaatcgttgtgatgacatatatgcagcgaaaaaaatggttgctatagaacctgagatgtggaacttaatggtgttgtgactaggcgcgtgtgcgatgtatgtggagaataaaaaggagtaacggtgcagaaaatgattttctattgtgaatttttcatatgttgaaattattagtatagacaaatcgaaaagccgcccaaaggcggcctatttgttcgtttttgttttacttttcgttgtaaatcgttgccgttcagtgttagttcacctttcaccaaacgttattaggcttctattaatggagtgtttgcaacacttctgttgtaaatggaatgatttcggatatgcgatcttcacgaactttggcaggccattccggatcactaagcagaacacgacccaaggcgatcaagtcaaattcattgttctccaacttctcatttaattgatccaaatgggcatcacctgttccctggttctcggttgctctgtctacgaattcagcttcaagacctaccgatccaacggaaatagctggtttacccgttattttttgcgtccaacccgcaagattcagctcagatccttcgaattccggtaaccagaaccggcgtgtagagcaatggaatatatccacgccagcagtactaagtggggccaagaattgctccaattgttctggcgtctccaccagacgtgcctcataattccccatcttccattgggagaaccggagcacaattgggaaatcagaaccaaccgccgcacgacaagcttcaatcacttcaaccgcaaattgggttcgccgtaccaaatcaccaccataattgtcggtccgtcgattcgtctgctcccagaagaattggtcaatcaggtatccatgggctccgtgcagttcaatgccgtcaaacccgattcgctgtgcatccgctgccgcttgggcaaatgcctgtacaagaccttgaatctcctcttccattaatggttcacgtgatggttcacctgccatgctaacccctgacggacttacaggctcagcttctgcgttaggcaagtcaccggaacgacgtgctgtacccacatgccacaattgtggcatgattttgccacccgcttcatgtactgctttcactacattagcccatccttgcaacgaatcttcaccatggaataatggaatactcgctccactaaccgaagatggatgattaatgcctgtaccttccgttatgatgagccccactccacctgctgctctgcgacgatagtattcagcaacttctggtccaggtacgccctctggtgagaatccgcgagtcatgggtgccataacgattcgattagacaatgttagcttgtccgaggtgaaaggtttgaataatgctgaaggtacgttcatagtacattgctcctttgcaattggaagtgtggaactccgcatccacatgaaatgcgacatgcttttgtatattgtaacacgtgtaatccagttgactggtttaggattatttctctatccattttatagtttcttaattttattttcaaattttcgaagttgggcgttcaaactactcttatagaaaaaaaaaagaaagctaccttacggcagcctctgttggatcacactaccgaagcagtctgatatacactctactacatcttaaagtattttcccggtcaccaataatgtggatgtagcatagtatataatccataatcttccttccaatttaattagcattcacggggatatcactgcgattcactcgaagcaatttccctgatgaagttgataacacatccggatcggtacccagaccaaagtagaagtcaccctcgttctcttcgaaagacttggcatacgtgtcctggttaaaacgtaaaatctcattccatgtggtcagatccgttgattggtagacccgattgatatacagattggcactttgacgagtgtacgtaagcacatacaccttgccatcacgcaaaagcacatcggttgggagcgccttggcatccgggagattaactcgccttgcctgattgatgtcggtcatgacattcaaagatttgggcagcagctgcccatcattaaacacgccacctgctatatagagcaacttgttattgaagttaacatttttgcctattttattataaggaatcgtgcccgtttgataggttagtccaggcagcattttgttaccatagatgacaacatcccgtttctcaagattttcattaatctccaaaatattagttttgtcattccatattttattggcaggatacatcatgccagatgcatataacttgccattaagatggaacatggtataagcccggaaaccaaacgtattaatagtcgcatatttctgccaagtttcaccttcattatgagagattagtatggttggtttggactccgtacccagcgcggcaaacatcttaccctgatacgatgccaaatcgtatacgtgtacacccagcggcagattgcgatatttggtccacacctctccatccagacgatagaagttacccagttcccactgttcactatcggaatcattgccaggaatatataacttgtcgtttagtactctgtagatatcaatctgttcctcatccacatacatcttcgttgatggcaagatgctcgggttgctgttcgtcaccgactgggtcttgaattttgcattcgctgtatcataataaatgactggaataggacctgaattaggagctacgcccagattgctactatttccgtggcccaaatatatcttgccgttgtacagttgcatgtcccagacgttattagcatatggtgttttggtaaaaggtctgcctagcagttcgatcttcgatgttacatcggctgaactgatcggtgcattcgacaccttggcaaggccacgttccgtcgcagggggttgactcgttgacgtggtgttttttggcttggagttccccataagcatccagctcattcctgcgacaatggtcaaaattacggctgtccattttgtatgtctctgcatgtccgcttcctccttcattttttcatcatcattaccttcacaccaagatgatacaaattgtatctttttatactatgtaaaaccacccgcacatgcaacaaattccgccctatttatacaaaaaaagtagacaatcacatctgttgatgtgctgtctacttgttcttactgtctgtgatttctattcagcttttaccaaaatcttaacctgatttttctctttcaacagtgcttcaaatccatgctctaccacttcatccaacgtaattcgtttggtcaccagcttgtcagccgggaagaaacctttatccatcagactgataaccgccgggaacacatcgcgataaccaataatgccattaactgtacgttctttcatgacaattgagttcgggtgaatcggcgcttcctgttcaaaaatactgacgatcatcaactctccaccaatacgtgtcgaatcgatggcttgttgcagaacacgtggaacaccggttacttcataggctacgttaacgccaccttgtgtacgttgatggatctcttccacgacattaaactgcgttggatcaatcacaatggcaccgagctcttcggcttttgctttccgttcatccgataactccactacataaatatccgacgctcccgaagctttaagcgcttcgatgaccagtagtccgattgggcctgcgccaaacacggctgccgtatctcccactttcagcttgctttggcgcacagcgtgaagtgctacagctgaaggttcaaccaacgcaccttgctcatacgagattgaatccggaatggcatgtaccatattttctgcagcagttacatactcggagaatcctcctccgcctccagcgagtccaaggaaacccatctgatcgcacagattgtatctgccctgtttacaagcttcgcagtgtccacatgcatagatgggttctaccacaacacgatcgcccgccttgaaacgcgtaacaccttcccctacttcaaccacctgtcctgagaattcatgccccataactataggcgcttgttcccctgttagcggatgcggtgcttgagcgggaatgaagattggacctgctgtgtactcgtgcaaatcactgccgcagataccgcaccattccacttttattttgacctttccttcttcaggctgaggttcattaatattttcgagacgtaaatctttgactccatgccaacgtaatgctttcattaatttcatctcccagatcataatttgtgatataatcggaaacgtttccgtaaattaaatatgtcacattttagatacgctgtcaaacatatttctccactaatatggctatttcatgatcatatcgagttcacttaagaatgctcgcactttaattcaagtgatcttagcggtattacaaacgatgtaatccttgttattaacatatatcatggcaaatattattgtagtcccattgaaatttaatcaggcgttgccataaatctggccctttcacgggatacttcattgttcaaatgttataatcaagttatataactatcgtgaagttcatacatatccctaataattcggaatcgtttccgttaaagtgaggtaaccgtacattgaggaaagaacagaaacttacgatcaaggacgttgcagagcgtgccggcgtgggcatcgctaccgtatcccgggccatcaacaattcagaaggcatcagcagtaaaacacgggataaggtgatgcaggccattgaagaactggggtttgtacccaacacctcggcacagagtctgaaaatccggcaaacgcaccagatcgctcttgttgtacccgacatacgaaacgccatcattccggaaatctcctggtctgtagagcaaacggcgaagcaacatgggtaccatgtcgtccagatcaatacggcaggcaatgccagaacggagcttgaaaccattcgtaatgtcaaaaaattgcatgtggatggactgatcttcatgcctctggcgtaccccaaaacgttacccggactgattgataaggcgccgctccctatctcgatgattaattacggcaaaaaactggaaccgggtatgaaagcggatatcgtctctctctctcaacctgaaggcaaattggtaatggaacatctgttcaagatcggtcgaactcgaattgcatatgcgggagcaccgaaggacattattgaagaacgctttcgtgcgtatgagcaagccgtaggtcacgtggacatttctctcgtctactttggtgaggacttttcattaaatacaggtgccaatgctgcagattatttctatggacttacgcatatgccagatgctgtctatgccattaatgatatggttgccatcggattggttaatcggttcaaggagttaggggttcgtgtacctgaagatgtggctgttgtgggtgtggataacaatcaatggacaaccgtcacgtctcctcagattagttccgtgtccattatgggcgaagaagtcgccagacttgctaccgagctgttgttaaaacggattcgggagatgagcacgaccgattacgaacacatccaatttgaaccacgcttaatcgttcgtgaatcaagcgtcgccatgattcattcctcccagcgaggacaacacagttaaatttggtgaggggtatgggcattaggatagaatatattttacggctatccctttatttgtcctgctacacagatatactaaaaaggtgttgctcaggtctaactctttcctggcagcaccttatttgtcgttgattctatataactatagcagagtcatactccgcatacgttcattctaagaaagcagttgcctgatcggtgttcccttcaggaacatctctatattctctacggtatgattataatagatctcataattgccacgagtcacataacccagatgcggtgttgccaggacgttgggcaatgttcgcatcacatggttaacaggtagcggttcctgctcatatacatccaggcctgcaccagcaatcaccccacgctgcaatgcctccaccatagcttcctgatcgacaatgcccgctcgcgacgtatttattaatagcgcactcgatttcatttgttgaaattcggcttgtccgatcagattccgcgtacgatcactcaataccagatgaatggatacgatgtcgctctgtgcaagcagttgctccttggtctcgcaccagatcacaccatgtttttcggttttttcacgtgttagattctcgctccaggccatcacattcatgccaaatgcttgtgcgatctcagccatgcgagtacctatcttgcccaaaccaagcaatccaagtgttctcccatgcaaatccaaccctacagtgctctgccagtttcgattggagcgaagtgcattattttccgtaaccagttgtctggacagccctagaatcagtgcccatgtaagctccgtcggcggattagagcttccctcggttccacacacaataattccgttcttctctgcagcctttagatctatcgacgcgttgcgcataccacttgtaatcagaagttttagattagggagctgcgaaatgaccttctctggaaacggtgtacgttcccgcatcagaaccacaatatcgaaatcctgcaattcctgaatgactttttcttccgagcccatatagttgttgaatgtctgaatctccacctgatccatcaacggaccccagtccgccgacgtcagcgcaacgttctgataatcatccaaaacggcacagcgcaacttcgtattcatttctgatctcctcctatatctgctcaattcttaaatatattgtagcaactccgcatcactttaaacagaataattccctattaatgtaacaaagacagcgtaacctggatgctctgctctacaaacaagcggtctggtcctgatttcatcagaacagtcagtccaatcatggatacaaccagagactgtgcgaccgcactcgcgttcatgtcagtagacaactccccgctctgttgccctcgttctatcgtttctttgaaaagaacacccaggtacatctgatgctcccttgtaaggacagcgaatttgggatcatgtggagccagctcaaccatcgtgttaatgcaaaaacagccgtgactaggctcggtcacactcccctctgctccaatatgttcaaacaatccacgaaaggcttcccgcacggaggagccctgttgaagtctggctctgacttgagccgcgtgctgagtggtatacctgcgaagtgctgtttcaaataattcctttttatcgccaaaagccgcatacagactgggacgttgtatgcccattgcggtcgtcaagtcatttaaagatgccgcttcgaatcctttgtcccaaaacgtatgcatcgctgcatcgagtgctttatccgtatcaaattcccgttgtctaaccatacaattcacctctttatgtatcgatcagtatgtttatatattttaacctcactcttattacaaagtcaaaacctaataaccggaaaggagtttttagctataaatgaataggaaaatctggaatagaagcgatcggataattattttgtcgtcatattctctgggtaaaaatctttagtttaaccctcacccaattctctattgacagaattcacgcaaataaagtatggttatcccgaaacataacataccggtcagtacataatagaaaggtgacaaatactcatgcaaacttcttctccagatgcacaattatccaataaggatcgtcctgccatgtcacggttagttgctcttctttttaccgtgtgcagcggacttgcggtcgccaatatctattatgctcagcctttgctggactccatcgctcaagaattcagcctctcgccatcatccatagggattgtcatcacagtgactcaaatatgttatgccttggggctgttccttcttgttccgctaggtgacctcttaaatcgccgcaagttgatcatcattcaaatgctcttatccgtgcttgcactggttctcgtaggaaccgcacaatccagctcacttttattcacgggcatggctgtcgttggtctactcgcggtcattacgcaaacgctcgttgcctttgctgcacacttggcggccccttccgaacgtggtcgcattgtcgggttggtaaccagcgggatcgtcattggcattttacttgcacgaacggttgcaggtacgctgaacgattggttcgggtggagatcggtatatctcttctccgccagccttacattactcggaattgtcgccttattttttgttctcccaagacaacaatccccacaagtaaaacaaagctacttccaattactcggttccgtcttgcaactgtaccgtgagttgcgtgtgttacgagtacgaggtgtgctggccatgctgatttttacagccttcagcatcttatggacttctatggtactgccactaagtagccctccactgtccctgtctcatacagtcataggtgcattcggtctcgcaggagcggcgggagcattagctgctgcacgtgcaggtaaacttgccgaccggggccttgggcagaaaacaaccggtgtcgcccttgtcattctgctcttgtcctggctacccatcggttatgtccatcattctctctggtttctgatcctgggcgttatcctgctcgatctcgccgtacaggccgtacatgttaccaaccagagcctgatctacgaagttcatcccgaagcgcagagccgcctgacggcagcttatatgatcttttattccatcggcagtgcaaccggctccatcatttctacccaagtgtatgcatgggcaggctggacagccgtttgctggttaggtgctggcgttagtgcaacagcccttgtattctggataatcgatcgttgtatgcatcggaatctcaatcgttgaattagtccagtttattccacaccacaataaagagggttgccaacggaccaaataacagggaaatcagaaaccagttccgaccacttctgttttttccctgagccagtccggcattaatcaaggcaagtgtgccccaacctacaaaatattcattatccatcaaacgtcttccctcctctatcccttcaattctgactactgctcaagcatatctttgagcttacgattacgatcctccagaaatgcctgcatgtatctcttcagcacaagtcgttcggttgcccatcccagcaatccaagtggagcttcgaatcgaagtgtgtctctcatgcaagtcatctgatccccaattacgctgaaatgatgttcatgtcgcatgctcttgaaagcccctttctccatctgatccacaaagaggaaaggtcgttcgaactgcacaattcgggacttcaacttctgtctgaccccaaaatgagtagcctgaaatgtaacggtatcccctgctccaattcttcctgtggttactcctgcaactgctcgctctcttgtatgttgccagacggtctgagtatgtacatcaatatcccgggcatagtcaaagcatcgttcaatcgaggcatgtattgtaatctcggttgtcacttcaatcatggcgatcgctccttggcaggaaaataaggtctttgcaaagtatacgcttgcttccttggtcgaacaacacatctaggatgctataacaaaaaacgggtcccctgtcttcgtacaggaggcccgttctcaatataagtaaggaatacagataatacttagattaaataagcaattcatcaatggcaagcgtacgctctttggagagatcgcgatattcttcagactccactttgatgagtggtttgaaaatatcggacgtattgttcatgacaataacacctttttctccattgctgagcagtacctgtttcccgatgaaattaggaagcaaatgttgcatcaatgcctgaaccggtttttcattcaatttaccaaatcccattccatagatatctctaaggttgttgatcaggtttggattgcttcctccgtggttcccggatctcatgcctatatagatatccgctacagatacaatctgtgtatatggatgaatttcacttttctcaagttgcatcggataacccgacccatcttcccgttcgtgatgttgcagagcaaccagtgctgtcgcttcatccgtcatcgaatttttgataatttcatggccatatatagtgtgacgccgcatttcaagctgctcatcagccgtcaacggttctgttttgttccgaatccggtgggaaactttgcactttccaatgtcatgcagataaccaccgcgactaatctgataactctccttctgagaatatccaagccaattcgcgaggtagaatgacaacaatcctacctggattgaatgtgtatagttattgacgtcatcccgctccagcatcatcaggagatgaacgacatctttctgctcatccagtccttcaaccatcggttgcagtgcatcatccaccatggtggcgttgaacttgccaacggtcagagcttcgagaaaagcattttgataattatgtacagtctgaataaattgggacttcagctcttcttcaggcggttcttccttcgtagttatccccgaagcatgctttgcggctgctgcaaaaaattctgcttcagtgatttcctcttcgcgtgattcaatatctacataatctacacggtgctgcataagcaaggtgatatcctcacctttgatcacagttcccttcccgagaacgtgtaatcctgcatcgctgaatgtatccgcagttagacggtctccgtcttgcaggttcataatatggattctcaaatcggtattccccctgaacaattcattatagtaacagcacccaacggaacggggccacaaaaatacctatacttctttatatcgttataattcttcatttcatacatagttcaaacgaccttaatcacaatggtaaatacgaacgcctaagactttatcctcactccaacatccaaattagtcccggttttaaacttttacacacttttgtgcctcattgccgtatcagagtaagccaaagaagttcaaacgctccgtttgaacttctccaagacttctcaaattagattttgatcgaacccaggctagcacctttaacaaaaaatcgttcaatgctcttctcgaccgaagcatcgggaatcagcggcggtgcctgatggggtttggtacgtgcatcaataatcacctgatcacagccccaatgcttgtggtcatatccgctattaaccccgtacatgtcatgtgaagggttgctgcgagtaaaggttgcccataagaagttgctgaagttagcactcaggaacgaactgtcgtcacataaaatgatcatcggacacgagtccagacctccctgttctttcaatagagaagtgaatgcttgcatctcctgtgctgtatccgcataactcgtaaaggccgatgtctggatcgaaacgatacccggcatgatgagctgtggattctcataaccacgaatgtttttcaaagactctggcacttccgtgcacaactctcgaaccttgtcgccataggctgcaaaaacaactttgcttccgctgttcagtcctgtacccgaataatcgagtgtatcaatcgttgtatgggtatggaaatgaatatcccgctgcatatccatacgctccaagatataggtcaggaattcaacttccttgtgggtatccagaggttgctgatcctcagcagtaataaacaggtacttcgcaagactaagctgacccgtacccaaaatacgattggcaatcgtaagcaactctgtcggctgcttcaccgcctgatacggcgtgtaacgttcactgccgatggcaaacagcaatggatggacccctgccgcatcgaccgcatgcacttctttgacacctggaatctcctgtttgatcgcgtctccagtaatctcatgaatcaaatcaccaaacgccgtatcctcttgcggtggacgaccaacaacggtaaacggccagatggcattaggtttggcatagactttatgcacacgcattagcgggaattcatgtgtcagactgtaataacccagatgatcaccgaacggcccttcgggttttgtctcacctgggtagatatcacccgtgatgacaaaatcagcatcattactgatgcaatatccgtccttgtaactgtaccggaaacgacgtccagcgagcaggccagcaaatgtcatctcactgagtccttcaggcagaggcataaccgctgagagtgtatgtgcaggtggacctccaatgaaaatactcacttttagtggttctccctttttcacagctttggcttgatgtataccaattccgcgatgaatctgatagtgtaatccaatttccttgttcatttcaaaatcattgccatccagttgaacccggtacatccccaagtttgaattcatgattcctggtttgtccggatcttccgaataaacctgtggtagcgtcacaaatgccccaccgtccataggccaatgtttgatgagcggcagatccgagatttgaatctcttgcgcggacaccggcaggcttatagatttctgttttggcagcgcctgccacgcagcaagacctgtttggacatgctgaaatggtgtcttaagcgccttcatgggatcgtcacgaactgccatgacccgttgtacgccttccagcgtaccgcggaacatgaacttgcttcgttccaccgtgccgaacagattggatacggcctggaactttgaaccttttacattttcaaataacaacgccgggcctttagcctcgtgcactttcatgtggatcgctgccatctccagatgaggatcaacctcttctttgacccgaatcaaatgaccatgctgctccagatcgttaatacaatcttccatgttgcgatatttcattggatggctccattctctgtatgattaaattaattaagttcatagattcacataacgtctcttctattttatcaaatgatccactgctaaacaaaactatatgtgaaattttgtcgcaaatacagatatcaaaaaaaagcaatctggcagcaatctgaatcctgaacacacaggaaccgattgttaccatattgctactctctattttctggcttccttaagatgtaggtgtaatggtcgatctggggatcgtgacaataaactgtgtaccttttcctacttcgctctctacatcaattgtacattgatgcaatttcagtattttaatcacaatggacaaacccaatccattccctcgaagcgagctgcttcgcgctttgtccaccatgtagaatcgatcaaagatatacgggagtgcttcctcaggtattccttgtccagaatctctaatcaataccttcacatgtgaagatgacgtctcaatttcgacatgaatggcaccttgtggaccggtgtatttgatcgcattgtttattaaattttgccagacctgatcaaacaaatctttgtccactgtgatctcgcagggcaacaagtccagttcgatctgtatgtccttctgtgaccactgcggctctgccagtaagatcgcccttcttaattgttcatctacctggaatgtggtgaaatgaaccggatgatgctccgaatccagcgaggctagccgaagcagattatcactgagcctcgataagcgcagcgtttcctcatagataatatccaaatgctctttctgctcttctaatggaataacaccatcttgaagtgctctggtgaatcctctgatcgatgtgagcggagactgcatttcatgagagacgttgctgacaaagtcatcacgaaccgaatcaattttctgcaactcactggccatatgattaaagctctccatcagttcgccaaactcatcctgattattatgtttcaagcggaccgacaggtcacctgatgacatctccttcgctgcaaccgttaatctcttaatcggtttcacaatgtacccggacatgaacaggattaataagctgccaatcaccagaactgttaatagtgaggttaagagcgtgtttcgcagtgtatgaaaaagagaggagaaatcactttgaatcagaaatgtgccgatcccctcgtttgttccgggaacacctatggtcgcgattccatctttactggacagaaaaatggcatccgttgtacccgtttcaaacaacgaatgaactttgtcctctggcaaggaagataacacttcactttgttgattcacgggagtgatatttaagccgtagcgagcaaagatacctaagcttgtatgtactttttccggatcatcaatcaggttaatcagtgtagcgagatcttgagcaaaggtaaccataaaacgattcggtgtcttttcctgggacccgttatttatcataaaggagagaattaaactcaccagaacaatcccgataaacgtagctacgatgcgaagtcgcaggcttttcctaaacattttcatgcccgctccagccgataaccgagtcctcttatcgttgagatcactaactcaggtacaggttcaagtcgctcccttaaccgtttgatatgtacatcaaccgtacgctcatctccttcgtaatcgatgccccatatgtcatctataagctgtgtacgtgtgaatattttccctggcgaactcgccagagaaaataacaattcacattccttctttttcaattctatagtttgtccatccgcaacaaccatcaggttgcccaaatcaatcgtaacaccgctgatctgaatcatgtttgatgaacttttgttatatcttttcagtaacgattttacacgtaagattaactccacaggatcaaatggtttaaccaggtaatcgtctgacccggcattaaatcctctgactttgtccttggattctcccttggcagtcaccatcaggatgggaatatccagataagaccgaatatcttccgtcagttcaataccgtctattcgcggcatcatcacatccacaatcgccagatcaactttcgtatgcgagaggatatctaacgcctcttgaccgtctggtgcttccagcacggaaaattgattcttttcaagatagattcggattaatttgcggatatgggaatcatcgtccaccaccagaattgtgttcatgtagccattatcctttccaaaattgatatttattcgtatcgtaaggattccatcgggtccagcttcgccgcttttgatgatggcatcaaaccggcaacaatactaatcgctgtacttaccacgataccaaacaagatataatatcccgagagattaatgagtttggctccaaacgcattgtccaaaagaatgtttaacacataactaatgatcactgcaaagattaccgcaataataccactaaatacgcctaataaggcagattcggagaagaatattcgcttgatatctttctttcttgctccaatcgcccgaagaattccgatctcctttgtccgttccacgacactaatgtagagtactaccagtatcataataccggatacgatcaacgaaatacctgcaatacccgcaagtacaatggaagccatacttacatatgtggtgatattctccatgaccttggccatttgggagcctgcgaaaccagcgtctacagcagcttcattgatatcatttacatatttcatatcggttgcataggcgttaacttgaattggcccgattgttattccttcgtccgcatacatttgctccaacgtctctgatgagatgtatcccggagattgttgcattggagattgcggatctgccgcttcgtagatccctgagatcgttacttctttctccaaggtcactggtttattattactatccatctcattgatatatagaaacacagacttgccgatcatggtttcagcttgatcatttccgcttaatttatttgctgtatcaaggggtaacaacatctcattttctaccggcagaacaccagttgtcatcagtgctggatcaaaagcatccgttaacgttgttaactgtgtgagtcctacactttgtttttcattcaccatagtcgatttgcctgtaatggtcgtgatcgtctctacatgatccacattaggaaaattgcgaatcgtctcaacatcagcttcggtgaacgattcacctggtgccatcaaggcctcgggaccttgcatatccttggcttcttcactcggctttgttatatccacgagcaaagggtccatacttgaattgatttcgtcattcatatacgtcgttattccattccccaaggagagcatcagcagtacacttaatatacctatagatccacccaatgctaccaatacattacgcttgccgttgagtttcatatttttaagtgccatcttgaatgaagcaagcaagctcaggctacgggaagaatcctgaccactctcgtaaacagccgtagaaggatctttcaggtgaatatcgtcactaatacgcccctcttcaaccttcacaatacgtgtaccggagtcagcgactttctgcgagtgagttacggcaatcaccagcattccctttttggctatactgtcgagcaaagcgaggatttgatctccgttttccctatccagagcacccgtcggttcatctgcaagaataatatccggattgttggataatgcccgtgcgatggaaacccgttgcttctgaccgccagataactggttgggacgtttattcagatgatccttcagtccgacctctgtcaaaatatcaacggcacgtttattgcgatccttctcattcgtatccgtcatttgcatcgcaatcgttacattttcgaggacagacagatgcgggatcagattgaaattttgaaagacaaagccgatattattcttccgataatcatccatttccttctctgtcatggcacttaagttcttgccacgaacaacgacgtccccttcatagtcggagtccataccaccaatgatattcatcagtgtcgatttaccgcagccagattcgccaaggatggagacaaattcccctgtctcaaaacttaagttcaaaccgtggagtaccggaactctttcttttccatataaggtgtatgatttcttcacatttttaacttctagtattttcatatggatctcttcctctcctgatcatgcacgatatctatctatttgatgttcatatcgtaacaaatcagtatgaactgataatgaactggaccatcgcacctacaagaggttgttcaaaagaactatatacaaaaaaacacctacagcttgcttgaaacaaatcatttcaagtaagtgtaggtgtccaaatttgattagattaatcccgcttttgccagcagccttttcacaatcgcggctgactgtgcacgactaatgtctgcatcggacatcagtttgccatcagcaccttgtaccagctcttgtttaatcgcggatgcaactggctctgctgcccaagcctgtactttagcactatcgctgtatgtgctaagcagacttgttgtctctgacgcgtcggcctgtgccagaccgaccagtttcatcgcacgtgacacaatagtcagcgcttcagcacgagaaatttcgctattcggacggaagctgtcgtcagcataacctgagattaggccgtaggacacagccgtctgaacctcatcctcataccagctaccagtcttcacatctgtgaacgatgccgcttctgtactgcgcggggagtgcagccccaaacctcttaacagaacagccgtaaactctgcccgtgtaatactccggtctggcgcaaacacgttctcaccggtgccttgtacgatcagacgggatgccagatcctgtacgtcatcccgactccagtgacttgatacatcgctgaatgttgccggatgatagatcagagcgtaagtgctgttcgtcaagctgttaataatagcagaatcttgcacgttacctttgataaccttggtcggtacatgcagaaggctgccatctggctgaagcacaactcctgtcgtgatctttgaaccatcgacaccttctggcaaagtaatggagcgctctacataagagttgaaacgatctacattaacttgctgtccattccaaatcgcttttacttcaaaatcaatcggagctgcgatcacagttgtgttctccagcttacccgctgcagcctgaattgctgtttgtttagatgtggcactaggcacaatagcgatttggattgtgatatcttccaatggaaccgtgcttccgaattggttcagaatctgatccacttgaatctggttagctggaagtgtgtacgtaccgctatcagtctgaatgacaacttcggcattacttccttccattgttttgaccaacttgccgttcagttcaccaacgaccgcacccttgccagtacctataataggcagcagaagcgtttttagtccacttccaatctgattgatgactttattattatccacgtgaacagtcgtagtaacctgattgcctacctttgatgtgctagccgtagcagactgttcctgtttctgtccgttcacatagatgtctacgcccttggttaccgccggagtcgatggaactggggtaacgactggtgaagttggtgatacacttcctcctcctcctccacctgaagagttaccaggattcggtgtaggtatcgaaccagaattgtcgccacctgagtttgctgctgtaattgtgattgttccaccagacaactgagcaccactattgtgttctacatttgtaaaatgccaatgttctgaatcagtttgatctacggatagctgtttcgttccaggcgccgcattacttttggctttgatttccatatcaaataattgggtttcatctacaattgagtggtcacccccagtaaaatcaacccagatgatccgtacccagccttccgcattattaatttggtactggaagtctgctacaccatcttcatttggggatgtgctgatgacgttgacagatttaggcgtgatccgaacaatttccagtgcagacgtatcataatcaatctgcatattataagctttcaccccgaaatgggacttcttcaatgcaacaggtacatgaacggtctgccctgcctgtacgctcacatttgcaaattgtacttgtgatggttctaccggttctgctccagctacatttggcaatatgagtgaagagagtaatgtcagtgcgatcagacctgacattgtttttctgattctaggacgtttctttttcggttgaaacatatgatagcctccatgtctgtatcaattgatagatcgtatggtaaagatagaaaatgtattgttattcgttatctaaaataaaaaattgaattaatcaaggcgttgtattttttcttttccaacaatgtatacttttctaggctccgtattcgagtcccaagtggactgagtaataacttcgagcacaagataataaccttcgtcctcatctttaacggtatactttgctcctgtttccccctcgattggcaccatatcttctctcgaagcttctgttgcgcggtaccactggtaagaaggagtattaatgtaatcattgtaatcaatatccattatataatgactaacgccaatttcatttccaattaacatggcattcttcaattcaccatttagtacatacggcgcatcatctacttgcttaaaggtcaacacatagtcattgttttttccaccaagtgttttgcctttgtatcctattaacaaagcatccatgtcccccagagtgggttccgtattacgatctacatccattcggttcatctctacataagaaaagctgcggcgattcatcatgttacgaatataattgaaaaggtctacggcatccaaagaattcacttttccgtctgcatttacatccccttttttactaatgtaaagttcaatgttatccgtaacagtctctggtgcaccagagatcatataattcgctttcaattcgatgttgattttgccgctttggcgaggaataaccaccaatgtactgacaggcgttgtcatattctcatcctgtctcgtttctacatacgcctcagcgatgctgttatcacttgagctggctgtaggcgggctatactcatcggatcgaaattgtgtacttagattgattctgatgatattattggtggttacctcaataggcacttcgggcacaaaagaaggattatcttgtgccgatgaataacttaaccagttaatgccatcgttaagaacaggttgtgaaatcttaatctctgggccaatttctcctgcgttagcttgaggaagcgctccacctataggcaatgcaatgctcagcccgagtgcagtcaacatgctttttttcaatatcggcttaagccgttttttgttttgtttccccttcaattcatgttcctcctcgtatacatttcaaatttgaacaactacatgctcagtataacgacccattctgaaccgattctgaacaggaccatggaactacttccagtttcaattcgacaaaaaacgccatggagtaagcctccatagcgttttgaacacaaatctttttccagtttggatcatattcacctaaaattaaattccctcaacaatccgtttggctctaaccttcacctcacggtaaagttcatcctcatcaatcgtgagcagctttctgcctctcatgaggatctgaccattcacgatcatggtgtccacgtccgccccatttacgctgtaagccagtaacgattctacctcatgtaccggttgaagatgtggtttcgccagatcgatcaggatcagatcagctttgcaccccacctcaagcatccctacgtcatcctgtagaccaagcagactagcacttccgcgtgtagccatgcttagtacgtccttggctggcaagcgagttgggtcgccataatccagcttttgcagccaggtcgcggctttgatctcctcgaacatatccacggttgtggcacttcccgctccatccgttccgattccaacgttaattccctgagccaacatctcggtaattggagcaattccacagcccagcttcagattgctgactggattgtgtgctacaccgccgcgcatgcccttcaatctgccgatgtcccttcgattgaggtacacaccatgtgcaagcaacacatgtgcctgttcgaacatccccgcctcttccaaatactctgtcggtgtcatgccatagcgctcacgaatcttcacaacttcttcctttgtctcagccagatgaatatgtagcggaatatcctctgtgacagctatggcaatgacttcacgaagcggctccatgggacaagtgtagggtgagtggggcccatacatggttgttatccgtccctcggccgctccagaccagcgttgcacaagatcgatcgcttcctgcaacctgcgtcccccatcatcctccatgaataccatcccacgtgtaagcgatgcccgcatacccgtttgtttaaccgcttctgcaatttcgttcatatggatatacatatccgcaaaagcagtggtacccgaacggatcatctccgcgatggataatttggcaccccaatagatatcttccgggttcatccgtgcttcggcgggcagcattttgcgttcgagccagtccatcagcttcagatcatccgaaaatccccggagcagactcatcggtgtatgttggtgggcattaattagtcctggcatggcaaccttattacgtccatcgataatctcatcttgcgggtgagacacaatgtgatcagcaatatgagtaatgcgatcaccctcaacacgaatatcccccgtaaagggggcatcggcatctttcatcgttaggatcgtagcttgctgaatcagtatactcattacattcacggctcctctgaattggttatggtcattccatatccgagggtaagccttcacgtaacggcaaggtcaagtcattttaatttttgaatcgtcatctttctgaaatgttgtataaaaggtttggggtcgatctcgaccatatatggatatactcctgtgcttgtgtgcaaatagaaaaatccaccttcatcacccatacggcgaaatgacatatcaaacacttccgtgatgttgaactcgcggtatttggtcacgattttatctgaatacagaatcatggagcgggcattcatctcaatctcttgggcgagacccgtcacttctctctgtactttgtaataaggtaatacagcaacgcagttcatgatctccctccattcatgccatgattattgttccatcatagcagatcggaggttctcagcaaaagaacatgaaactaggtgatcttggtcgtcacctttagtggcgtatgaagtgcatcctgaatgtcttgcaaagagagacactgttcaatatgaaacacaccatgtggcaactctgactccgttctatatacgcgttccgccacggctgctgccacggccgctgttgcatctgcttcctttgcgccgaccagtagttgttcgacgcggatttgctcaccattttcccaacctagggcatcgaccttgactgcatacatcggttctcccccaggaataaggccaaatgccttaaccgttccattccgaatagacgggatacgcaacaacgaaaacaaccctgcacgtttggagattgccatggatcttgtgatccagcgggagtccagacagagtctggtagatacggttggaatacgtaacgttcgagcaactacatgctgatccgaaaagttaaatcgataggccttccgctgcccaagttttgctccaaaatcaatacgtttgccatctccgaaactttgtacctcagcaggtttgcccttttgcatcacttggtaagtggcattcatctgatcaacggtccactccacggcagcttttccgtgcttctcaccaagtcccagcattacggtaatgtctgcttcctccacctgatccatatgcatggtcgcttcgcgcacaagcaaattagtcactccgggtgataatccaacgctgaggatcgcggtcgattgggagcgttgcattttggtgtgcagttgttcaacctgagcgagaaaatcatattttgcagaaatatcaatatagtcggttccggcttgtgcgcaggcttcaacaaaacgggtatcgctctgatccacacacatgatgaccagcttcacaggccgtaacatggatggctccacaggttttgttacatccagttgaagcggtagcacagcaccacctgtagacctgctgaactcttccgcacggttcatgcgtgtacccgcagcccatactttacccgggaacaatttccccagttgagtacatatcatctgccccacttgaccataaccaccaaccacccagatctgatctttaataggcttcacgctagtttcgaattgcataatacccctccacccagaacgccccgaagtaacgtgtaatatgtgagaaaccgcattcggtcagtagctgagtcatctcttcagaggatattggatcggattcacggcccagggaagcagcaaagcgctcccactcttcaggaaggacgcccacactcaacatgtgatccttccaagcttgcatcatgattggatgtgcaggtgaacgaagatcggcatttacagccgcaatgatcagtggtgcacccggtttaagtctagctgcgaggctggtcagaaacgttctcttggcctccatcccctgaaggaaatgtaacatgagcatgcttgtcgccccatcatatacaatatcctccggcaattcttcaaccgtgacaggttgcagtttcactctggaaccgatgcccgcttccgtgactcgtttctcagcaagttgcagcatgggctgtgatggatctactccagtcaatgtccaaccggcatgacgtgatccgagcagagcaatctcttttccccctcccgcaccggcaacaaggatatgaatatcgttgttattcgcgaaagatgctgaaagcagccgttccattagatcatgcatatgagaataacccggaattttcagggctatcgattgttcgtaacgatgaacatctgctgtttcccagctcatcggtgatagattgtgattcatggacaccgcactcctcttgaattgaagttagacttgactcgttgttcgtctaatttcattatagaaggatacggcgagcctacaatcccagaacattgggatatgcgcacagagagaggagtaatcttgttgacatcacgtattgatcggaaccacagacttatcacttctcttgaaaaaggagcctggacctcacatacctatcgggaagctgttctcaagcagatccatacggttgtacattacgacgcatactgttttactaccgttgatcctctgactcttctctccacaggagccgtgacagaagatggcattgaggccattcatgatcggttattcatcaatgaatacatggaagaagatatacataaatacgctgaattaattcgcagcggtgagcatacagctacacttcatacgtccaacttacagcttgaacaaagccctcgatatatcaacattcttcagccagcggggttcggtgatgaactacgtgctgtattggttagtggagactcttgctggggatatctgaccctatatcgtaagacagaaagtgctgtctttacagagggggagcggttgatgattcagtcctggaccgcttctattgcatcgatgctgcggtccacgagcttgacactgatcgatgagatcacgagtgaaagtcccgaggaacccggaattttgatcacctcagacacgttccagctcttatccctgaacgcctccgctcaatattggctgtcccaattgcgcatgctggaacatgtagggcctgatgttctgccccgtccggtacgtgcagtgagttcccacctgcagcgcaagaatcgggcagaactggtcgtggatactcagatcgctcccgaatcaccctccaaagtttgcatccaacttccggatgggcgttacctcatacttcatgctagtctcatgcaacagcttacagggccggatcagattgctatccgtttggagcaggcgatgccacaggatttactgcccttgctcgctgaaagccatggattatccagtcgagagcgggaactgctcggatatgtgctacgtagctattcgtccaaggaaattgctgctgcgatgcatatttccgtctacacggttcaggatcatttaaaatccattttcgccaaaaccaaggtatcctcacgtcgcgagctcatctggtatttcgtttcccgttttcagctgtcggatgaacctaccatataaatcttgaataattctccagtatcaaattaactatcaaatgagaaaaaataaaaagatgccaatacgatatcctcgtaatggcatctttttctatatgctattgattaagaagcatagcggtaacacagggtaacttcgatgtttgaacttttgatatcgtgcattctgctttaaaatgtagcgcacagtcctgccaagccgttttccacaaaaaattccgactatattattgattgtgttatttggcttttgctagtaaataaagaaaatatggaacactaataactgtaataacgattcctgttggcacatctcctacgaggctaaccgtgcgcgtaatcgtgtcagccaacaccacgactagtcccccagccaagctggcagccggaatgagcaatttgtgatcgggaccgaccagttttctggccatatgcggagcgatcaatccaacgaaaaagaagctgcctcccacagctacactgccagaggataaagcaacagcagcgattgacaaccccaagaactgtcgcttcacggaaacaccaagcccctgtgctgtctgattgcccaaatggagggcattcagtatgcgagccttgtaaaaaatatagccgagtaagatcaagacccatggtgtcagtatggaaatataaccccaatcatcgccccataggctccccgccagccaatacagcatgaagttcatctgcgaatcatccagcttgagtgtcaagaaggtcgtcagcgccccgtacccgcttcctaacgcgaccccggtcaagatcaaaccgattggcgagatgtctcgtccgcggcgatacgataataagaagatcaaacccgctgccaatagtccgcctacaaaagccaacagaggcagagcaataaaggaactcttgcctgtggatgcaatgaatacaacgaagaacaggacaaacaaacccgatcccgaactaattcccagtgttcccggactagccatgtcattacgcaacaaactctgcatcacgccccccgccgctcccattcccagacctaccaaaatcgaaagtacaattcgtggcaaacgaaaatcaaacacaatcagattttgcttatcggtaccgtttcctatgagaacgttcagcacttctagcggtgaaagattcattttgccagaattcatgctaatgatcgcaaacacaagtatcagcaccataagcactacattgatgataatgcctcgtttcatcgtataacgccgcttgatcattcatattccctcctttgtcttcgagccaagaagagaaaatacggcacaccaatgatagaaaatataatggcaatcggcgtttcgaacggtttattgatcaaacgtccagccaaatcagccgatacggtcagcaacgcaccatataaagccgctgccggaataatgtatcgatagtcgacacctaccatatatcgcacaatatgcggggtgatcagacccacaaaaccaacagggccaacgacaacaacagccaatccagtcagtacaagtacaataattgtcgacaaaatcttgaccagtccgctacgaatgccgagtccacttgccacatcatctcccaaactgagcaatgtaacggaaggggacagcgccagtgccagcagtatacccccaacaaagagcggtgagataatcagcaattctccccatttgacacccgctgtactacccgccgtccagaatgtcaatgctcgccccaaatcataattgattgccaagtactgactgagtgcgccaaacaacattgaaatagacagacctgccagtacaagccgctgaggcgtcattccgcgattgcccagtgacgcggtaaagtaagtcataccggtggcgatcgctgctcccagacaagcgaacaacatcatctgccaatacgaataacccggcagaaaggccaggcatagtgcaattgcaaatgctgcgccagagctaatccccatcagcccggagtcggccagcggattacgcgttgtcccctgcatgatagcgccacataccgcaaggctgcacccaacgatcagatcagctacggtacgcgggagacgcatggtttgaataatttgatgttcagtgagctttggatcaaatcggaaaatagcctcccataccgttgctaacctcatatcagcagcaccaaacataatggatgccgccgacatgagaaccgttaatccaagccctattaccatgtacatggtgaagttcatcgccccacggcgtttttgttcaggcttgcttttcatctcgtttccctttcatcacctatttacaatccaaacgaatatggatattaacgtccataaattcgactggtcatgtttgaaaatttggagtgctcaattaaaatttcgttctaactcttatttagctaatgccagcaattgactaacaatataatcaatcaatgcactggaagtcattacgtcggtggaccaagatagcgaagaatctacctttacgatccgatcatgttgcacagcaggtatggcattccacactgcattatcagaagcaacgtttccatctcctaagaagatcatataatccccagagtaagcgggtaatacttccatggagacatcgccccaatatttatctgcatcgataatatccgtttggacttttgaaggtgcctgcaattgaagttcatcgtaaacaagctcgccaacggcatgcttggctccagctatgtagttacttttatcactgaattctccaaccgtaatggttacatcggataggcccgcattctgaaaagctagctttgcttcttcaatttttccggtataagcattcaaaacatccttagcctcttcctgtttgttcaaaacatcgctaataaattgtatccgctcttctgtagtcatatcaccatagggaacataaatggtgggggcaattttggataaatcatcatacgactcatcactccatgccaaaatgataagatccggctcaagcgtcatgatatcttccggctccatggctacttttatggagtctgtaatctggttagcataaacaggctctgtctctccccgtgcagctctagccacacctaaaggagttacacctagggctaccacatcaccaaccaaataatcgactacaactcgctgagggttattaggtacctcaacatcacccttaactgtggatatcgttctggtctgcgagactgcttctgaagcttttgtctccgacccttcctgttgtgtcgtttgctgtgtctgagcaggtgttgtatttgccgttcccccattattcgctggcgtccccgacgtacatgccgtcaataacagcatcatgcttatcgccgccgccaaaatcatttctttacttcttaaagatccaaacatcgttaattccccatctctataagacttgactagactcgctagttccctctcatcgtaagggagatgagaatcattatcaataccatcaacctgcatggatagtgcgtttattttccgataatcacttggcgtcatcttgtaatgcttcttaaacatgcggaacaggtttttctcatctgtgaaaccagctcctgttgcgatttctttaactgtcgcttctgtatgtttcaagtcatgacaggcagcttcaatccttctctgaatgagatactcctgtaagttcatcccttcgctttttttgaacaaccgcgtcaattgtccaccactgatcccaaacatatcggcaatttgttgaaacataatcggctccctgtaatgtttatcgagatataccttggcagaacaggctggatctggctggagataccgaatctcaccaccctccaaatccctgaacacctcatgaatcaattgatataaaaaacttttggcctgtagctgatccatcgccttgccacgtttccagccattcatcatccgttggaaccaatcgcgtagcaagataggattacttggcgtataaccaaactgttgaacaaatggattcacttgctccagtaattgttgcagatgtttcttgaaaaagagaggtgattctgctctataaaacaccataaaggtcttcaccatctcctctttaggcgtaatactgagcaggctccccttcccgccgtgaactaaaccgaagcgttccattgcaaatgtggtttcattcagttggattttcgcttctcccccatatgcatagataaacatgctactaggcattttatattgctccaacgggtattgtgacgctacattctgaaagcgtacatctattaatgtaatgatcgaacgtgtccagatactggccatcatatcaatcatctctggtgtaaatccctgtcttgcttcttcctcttgcatctacccgcactcctcgtctcactttttccaatgtatacatcacttaataattgatattgattatcaatatcacatttgatcaggtaagtatatatcattaagtgatattggggaacaggcagtggacgttatgctttccatccgctttcgtaaaaaactaaaaaggaacacctgatagtacaaaaaagaagcctgatccatatggatcaggcttcttcattatgttttttgtattcaacaagattacgtagtcaccatgtttctcttgtcacctgcgaccaaatttattaagactttgcaggtttccgagaaggtttggcggagctggattttttattctttttcttacttacttccacaaccacaggctcctgtgggtgttccaccgggtacattttacggaacaataatgtctgtagtaccaggaacgaacccccaaccgtccagtagagcggcatcgctgccggagctgtaagagaaaagaatgccatcatcaatggggagagataacccataatggcgaactgttttcgctgctcaggcgccatatttgcttgtgataccttggcttgaatcagatatatgaccgcgaccaccacagcgagtacgtagtccggcgctcccagtttgaaccacaggaacgagtgggaggacaactccggtgtaagtcggatggctgtgtaaatacctgaaagtataggtagctgaatgagcatcggcaagcaaccaatgttcagcggattgaacttatgtttcttgtatagctccatcgtttcctgagacagcttttgcttatcagcaggatcatttttgccttcatattttttcttgagcgcatccatctcgggtttcatggcgttcatgatgactcgtgttccctgctgggacttggcttgacgcatcatcaagggcaacagtgctaaacgaatgaccagcgtaatcacgataatcgcgaccccgtagcttccgttaaatatggtagcaatatgctgaatcagatacgacagtggaaatacaatgtagtgattaaaaaatcccggtgtcgatgaagtaatctccgacacgttgttgctacatccggcaagcagcatgactgcaaacaaaatgacaatcaggccatagatccgtcccttgcccgatctaaaagtgaatcccttgttagtcttatgttccatatatatcctcctcgttgatttgttgaccaatcgttcaacgaggaatgacaatctggttcatcttcatcgggcgcttctcttcgtctaatcatgcgactccagtcttcctgtctatgctgtctgtccaaacacagggcgggaagtacaggttcaagtccaccaccggcgccaccttccatccagtactctgtcatgccacaatgaagatgggcaatataggcataactgacggtgaagatgagtccaatcgaaaataaatatggtaataactcctgcagttcaaacaagggattcaccccctttataggttagtttttatattataacacttacatattgtttttgcataaatctgtacgtgaaaacaactactattcagctattccgttctcaatttggacatttctagctcagctcggtgtctcgccacgttataagaaggccatgaacgatctgatgaatcctcgtccaggtaggcttgacgttccagcatttccctctgaagatccggatactcctcctgggcaaactctcgaagtaacggaactgcatctgccgacagacttgccagataggttgcatcaatattgccagtctgatgataacgttcaatattcagctcggcaatccgtttatccatgcccacataattgacagcaacatatgcagtgagcgcaagcacaatataccagcggatcagcggtattgacgtgtaccgtatacgaaggccagcaatcagcaacaggagtgcgaggaagatcatgaatgcgtgtaccaggaagcggatgtacgtatatccatatgcctgctcataaagattcaggcgcataaacgcggaatacaacataattgctgaacaactgactagaatcaagagaagtacctgatgcacgatggaacccgttttgccactcgaacgggtatactgcaaagcaacaataagaataaagaagttaatacctgtgacgagaattaactctgcgaatccacttctcgcataatctgcgtaagacagatctaccggaagatgcccctctcctgcaccaaacagatacgaaaactgtacaagtacaaacaaaacgtacacacagttaatgacaatcagcatcgtccccacaatgatggggtccaatctgaatggttcccgctgaaccggagtgcgttcgggctcgggtgtaatcttattggtaaccttaccttcagtggccgggtccacaggagagaatatataggtgtgatcacgcttatcaaccgtggatactgctccatttttccaatgtgcgttcgctctcttctctgcctcatattgcattggctgtacaaatccccatacataaccgaacagcaatacacctgcgatgacaatccagatgattctcggtatccctggagtaaaagccaattgattcagccactccggaaaaccggctaaatactgatcaaagaccccgtcagcagaggacagtaatgcaacgactacaatgaggataggcaaggacgccacaagaccaatgagtactttgaaaacaactgttttctgggatttgcccatgccacgcccgcctgctctcacagcaacagcagcaacagtcccccaatgacgtatggcttgaggtagcaagtggtcaatagccgtaccaatcaagccaatctcccaccactgcttctgttttctgcccatcagatacgtcatatgtaagataactacgccaggtatgaccagaaaattaagaacatacagcagttcattgtcgtataacagaaacgttagcgacaacaatagcactacagccgctacaaaagcatcaatgaacttgaaagacctcatgcgatcccttgcaaacagatacatgaacacataaaagagaattacaaagataggatacgatacgccaatctcattaccatagaataaatactggtgaatgatcgccagcatccatgcagacagtagcgtgattagagcgcgttgcggtgaagccattattttatcaatcatgggaaaaacctccattaacctttctatgctatattctagatgataaaataggaatataaatagaaattaaaattgacaaaacttcttattttagaggaatacgtcagagttcacctccaggagggaatcaacacttgaaattacatcagcaatatctgctgttgcatcgccattacggtcaccatacagaacatgaacttacactcgccgatctcgctgagttgctaaattgtacacaccgcaatacgttaacgattgtcaaaaagatggttgcccatgattggattcgttgggtttcccagcgtggccggggtcggcgttcttcactgaccttgcttgttccggctgatcaaatcgccgcagaatatatgatgcaggccatgaatcgccgggagttacaggaagctgccgagcaggtgagcgcattctccagttcaacaatcatgcaggatcatctaaaccagtggttgcttggatattcaggacatcatacggaagccggcaccaataatgagcagattgatacccttcggttgcccctgcgccaacagcttcatgcccttgatccgctgttcattaatctattagctgaatcctttgttaccagccatgtctttgacgggttggttcagcggggtgaacagggagagatcctcccatgtctcgctcatacctgggatgtcagtgcagaccgaaagacctggatcttttatttgcgaaaaggtattacatttcacgatggtcagttgttgacggcctatgatatagtgcatacgtttgaacgactgcaatctacagatcgccggacactgtaccgtgatgtaagtaaacagattctatctattgaagcggtcgattccttaaccgtgtgtttccagctcaaaaatcctcatgaattgtttttgtccttcctgacaacaagtcgtgcggcgattgtaccctcaccaggaacaaacgaacataagatgaagcattcgagtgatgtgcatgggatgcaaaaacctgttgggacgggaccgttcaaggtcaccgcctgggatgatcacttgtgcagacttgaagccttttcatcgtattttcagggtagagcacatatggaccgggtagatatcctgcaaattccgtggagtgcctcggcaaaaatggacgatagccaagatatcgaaactccgttctttcatcttgttcataatccgtcttcgtctgcgggtgcagactggacacagattagtgcaggtgtaatggttcataaattactcacgtgtaatacacaaaaaaccggaccgttaaacgatccggaagtaagagcacaccttcagtcatgccttgctggaatgtatagagatgacggacatgcagatgactctgaagtcgtggagactgattttagtgcggtgaataccaagaaagtccaggtttactcggagggatttagcgatatatcgataagttccgtatcctccagtcccatatccttgcacattgcaaccattccacaatatcgcagggatgctaaaaatctggcgtccatactggagcagtgcggtttctcttgtaccgtccgtactgcaacgatggagcagttcaaaggaaatctgcggctggagtccgatctgattctcttctcgctgattcgggacagggatgaagaactgcgcaggtatgatctctactccacgttatctgagcatctggaagattctgctcgtataacgatccatgagatcttgcaaaccatcgtcgcctctcccatcgcagcagatcgaacttctgaattagatcgcattgagcaatttttggttgatcagaatttactgttccatttatccgaaaaaccggtagaaaccgcttatctgccttccgtgcgtggtctatctttcaacagccagggctgggtaaacctgcgtcatatctggtttccttctgacgtgcgagcaagtcagtttgattagacatcgtattatatttacttataccatccgatcacgtgtcttttttattttgacaatatcgtgatcggatgtctctgtttgcttctcaataaaatggtatctttacgacgatatactccaagcagtaaacccatcatggcgtattctaatattatatgaatgccgcgcccgataaaaggaaagttgacactgacaattggaaccttcccggtagtcatcgcaagagaatataacatttgcaaagcgaacgtgattgtaatactgaaaataatcattcgaccaaaaccatccctaatacaaggcaacgtctttaacatactggcaataaaccatacgattccaagcaatagcaaaatgcctgctgaccagccaaacacatcaataagcatcacaccgggatagtccatataaaacctttgggaaattccaaaggttatgtcaaaaccgttgccccaccatccggcggactgaaggatacttataattgaacggttatactcgaagttccccagcagatcattctgaagattcaaaacgacagagagtctctcaaagcgcttgtattcacctgtcaaaaacaactgcaacataataacacttccggttattgtagctccgatgaaagtatagagccattttcgtgtaatccaggcaagcatgatcagcgttgccgttccgaacagaaacaatcgtacccaatctgaagcttgaaataggctataagacggcaaagccacaagaagcatatatgttgagacggattgtacatcacacttggtgctcaacttatccagcataattgcacctatggcgagaggcaatacccacatcgatgtcgttgtaagatcaattgtaaaaccgaatatgctccagaaccgttgtacaccgtaatcaaacggtgataccagcggattaatccacaacataccacttaacaaaatatagatccaccaggcagcttttttccatttttgataatcaaaatacatcaaaaacaccatcagtattaaaccaaaaatggtatacatcaaatgacttatatatatcaactgatagttttcatctgaaatatttgtcgtataaatccacatcagcagcaggcttattattagcaaactggcaagtcccgttaacagaccccaatgcattcgatgccgatgcaatcggtgcatactcttgcctacgacagcgggatcacccatctgttcaatggcatatgcaattgcttcttcctctgtataaccttcttgttctttatccaaaatcatctcttccatgtggtttcccaactcatcacgcaagtcattatgtacttcgcgagctttaacctgaacacacatgtgatcaagataatgctgaattcgctcatgtcgattcgtcatgtcaggcctccttccccaagcacccgatccacagctcgacggaacaaattccactctgcttttttactttgtaaggcctccatccccttgtcacaaatcgaataatatttccgtttacggccttcgacctccatccagtacgactctacccatccttcaatctccatggcatgcaaaatagggtataacgtgccctctttcagattaaacacaccctcggattgacgatgtagttccttaattaattcataaccatacaacggtcgttcctgaagcagggtcagaatcaatgtttcggtactgcctttaatcatttgtttgttaacctgcaacgcactcactccttccttttcaattcatttagcaagagttttagatttcgaaaaatacacttttaaagctcttcttttcatatacatcggaaacctatgcatagaacaactaggtatgatattactttatccttccttttctgtctagccaacaagcttctttatttatgttaaaataaacaagtcctttcattcacgaactctaatgatgaatctatatatttgtgtatttttcaattacatatcctattttttgaatctaattaaaggaggcattacattcatgagcaaactaattttctttctcggtggggccggaagtggcaagaccacacttgccaaagccctttcccgtaaacataaagcggctttcttcgatatggatattctgcttcgtcccgcggctgaggcaatcatgacccttcagggacttgatccttccgaccgagattcgcctgaatacaaacggctgtgccgtgatcttgggtatcgcattacgatggacgccgctctggataacgtacagttgggtatcgatacgatcgttgtggggccattcaccaaagaaattggaactcccgattggattgctcaggaacttgcacgaattggacgttccttggaagatacggatgtgcgggtggcctatatttatctggagaatgaagcattgtaccacaaacggatctctgcaagacaatccccactagatgaatggaagttagccaactgggatgccttcacagcttctctcgtccgtaaagaaatagcctggccgctccctgcttcatccgtcgcttatattgataattccagtgatgatcctgcgattgcctatgctgaacttgaacgacggatgtacgcgtagttttataaaatctacgtcccaattcctttgcactatgtcgctttgcatggaaaataaaaagacgaaacaaaaagaggtatttgtcgagatccccgttgggtccatcatgacaaatacctcttttcatatatttaagatcattccaaactcactcttcatcctccacaattgcgggatcacgcaaaaaggtttgcggaagtcctgccataataagtgcgtactacggaatcgccattacattcgaactgatagattatagatgtacttaaatgtaagagaacgaacatatctgaactccaaaggagaatttcatgaaatctcacgtagcaacatgtccaactcgacaacaacaacacaactacaaatcaaatcctaattggaaacgtgctgtagtcaacatcctcctgattgcatctctgagtttcaccgcaataaccagtgtatcggcagagagcagtctccctcttcttcaggtaagccctcaggaaactgaatcgttcatcaatcaattcttcgcccaacctgaagtgaagtctgctctgaaaggtgcggtagtcaccgttgttcacaatcaacagattgtgtttaataaaggatacggttatgccaatgtggaaaaacaaatcccagtcgacgccgactccactctattccgtgtagcctccatctccaaaacgctgacagcaaccgctattatgcaattggcggagcaaggtaacgtaaagcttgatcaggatatcagcgcatacacagacggtttacatctgaccaaccataccggaacagcgttaacattggaacatctgatgacccacaccagcgggtttgatttcacagatgtagcagctacagacagagaactggaaagttcttatccgcttgagcaattcatccaggacaacaaaccgtccgttgttcgcaatccaggagaagttttccgttacgacaattacggctatacactcttgggctacattgttcagaaacagtccaaacttccgtttgagacttatgtacaacagcatatattcaaccctcttgatatgtcggatagccattttacactaagcaaagacacgctgagtaaactcgcaactccttatggcgctgaaggacaagaacttccgcaatatcccaatgtaccggacagctcccctgagggcggattcattacaactggacgagatatggctcactttatgcttgcgcagctcaatcaaggttcgtaccagggtgcacgtatactagaaccgtcatccgtccaagcgatgcaaacgttggatgtctccatacacccggatatacctggaacaggttacggattcgaatccacctattcgcagtataatcatggacgtaaagtcgtgagtaaagcaggcgatcttgacggattccactccaatctgtggctgttacctaacgagaagactggactatttatcgtctccaacagtgatggaccagatgtgcgagaagcgcttttccaagcatttatggatcatttttatccaaacaacaagacgcattatagtgattatagcgtacccaagtcttcacttcgtacctatgagggactatatcgggatatccgcttgcccgcatggttgtatgatatttcagcaacagagaaaggtcttcaggttatagatgcttatggcactcacaccttaacccccgttaaggacatgctgttcatggatgaggacggcaagcttgctggtttcaaaaaaaatcagtcaggtgaaatcacgtatttctattacaacaagtcagatagctggtccgagaaattgccagaagccaggccttatgaagatgtgccagaagaccatccctatgctccgtacatctatcgcttaacccagattggcctgtatccacaggatcaatccctatttgaaccagagaagcctgtaagtcgtggggagtttgtagcacaggttgtgggtataagcgggatgtccatttcagctcaatcaccaaaatttaaagatacccaatcaagtccctatgccccctacattcaaacagcccttgaactgggtattgtgcaaggtaatacccgtggattgttccatcctgaccaagccataacaaggcaagaggccgcggtgatcatatcaagaacggcacaacaactacttggcgcacctgccgtaactgccgatctcatcggttcacaggatcgttgggctgaagaaggtgttcagtttgtggttgctctaggtctctacggtcctgaagtatctgtatccagcaccggtgctgtggattatagatcgaagcagcctatgctcaggcaggaatcatcagttttgatgtacaaaatgttaggcactctgctacattaacatagagtgatgctcggcaagccatgtcattgctacatggcttgtttttccacttcattttaccaatgatgcattttataagaacggatgattttaccatgcgactgaaactctcattacatagattcatgaaaactaaatttaatttcgtgtggtttgtaacgatgttgtgctttatactgactgccacgtatatccatatctcttcttttatgaatccttatatcggactttcgttaacgccaaatgcctccaattcttgggtagtacatgatgtagatccgcaagggttagcttatacatccggaataagatcgggtgacaccattatctcgctggaacccaaaagagaagtccagttactccatcaaaaaggtgtattcttagtgactgaagcctacaccatcggcgttgagacttctcgcggtcaggcatccgaacatacaatgaagcctggaccacgtgaatggtttaacatcggcttctcatccattgtagaattattgctgttgctgaccggaacctatgccttctttaaccaacccggttcacgagtgatgcgtctgttctacctccttaacctgtccatggccatatgtatactgacgatatacacatcccagttgcctttatccaattatattctggccttttgtgcggcatggttaccttattgtctaactgctttttatgtgtcttttgtattccgtactcgcctgcatcgtttccggtggttactatttatcagcagatgtattgccgttgcctactctaccggccttgcctttctgtacatcaagcagtggatgatgaccgatgttcagatcaatcaaggcattactaccgtcagtactcctgttgcaccgtctggtccaaccaatctgctcaactttattctttgtgcaacccttctgatcttaatctggatgacatgggttaatcgtaaaagctacaatcgcaaggagcagaaccagctattgctcatgttaacaggaattattgtcagcctgattcccttcatcatctgttttgctattccaaccctgcttcaaggtgaaccgttattgcctgtagagtatacattaattggatttctgcctttatcatggatgttcacttatgtacttgtacaacggagtatgcttgacctcaaactggttatgccaagattgatgattcttggactatatgctttgatcgtatttttactgtttctggctgcttctcacctgcattcgttaattcatatcagcttgctgtttgtctcgtttttaatgatcacttgggtgtatcagtacatgctcacccgctcacgcaagaaaaacaaacttaacaaagactggttggaacaccagcaactgcggttgactgtgcgaatggctgagcagcaaaacatgcgggacatgattcatgtgtttgccgagatgttccacaagatgctggatattgaaggtgtaattgtcatatggattgatgataagcacagatattctcaggaaggcacagggatttttgcttccattcagaatatcgataatcaggcgttggatattgaagttgtacgacagaaatatgacttggcacaggtttgggagctgtcgggtgaacccactacggagacgataggatttctgggcattggtcacaaagaaaatcgcacccttttttcagcagaggaacaggatatcattgataaaggcaggctggaagcaattcgaatgctcgtcaatgggagactcttatccgatctgcagaagcgatatgaataccgtgtagaccagacagctcttcatgaacaccagatacgccgtcatcggcagttcaatgatattatgatggaatcccaacaggcagagcgtatgaaaacctcttatttccttcatgaccaactgcttcaaaatctgattttcctgtctcgtgatttggaggaattacacgataccggagagacgtataaggatcaaacggctgtttggctggagtgcctgtatgcttcccagagagatatacgccaattgtgtgatgatctctaccctcatattatggatcgaagtgatcttgaggaagcgttgcaatggctcatccgtacacttcaaatgcaaagtggcatcagaatggaactacactacaacgccatctctgaagagttaaagcacgaacctctgaagtccaccgtctttcggacgatccgtgaactcattatgaatgtaatgaaacacgccgaagctacgttttgctccatccaggtacatagaagggataatgacttgattctccaagtagatgatgacggtttggggtttaatgttcataccacatttgatactgcaacagggcacttcggtttgatatccatacaaagcagcattcagcatctcggtggagaattctccatacattccagccttggcaaaggaacctcaatcaacatccgtttgcctttaaccaaaggagcaactgaacaatgagcgaacccattacagtcgtactgcttgatgatcaccccctggtcatggaaggtctcaacaaccgcttaaaccgcgaacccggcatagaggtactgaaaacattcagcgatccattgctttttttatccgaagtagaggcgttgcgaccagatgttgttgtgatggatatccgcatgccccagcttgacgggttcgaggttgtgagaagattgaaagatcaatacgggttatccgtcaaaattatattgttatccggatacaactatcacgaattccagttaaaagcttatgatctgggcgtccatgcctacttgtcaaagcaagcaacgtatggacagattatcaacgtcatccaccaaagtatgttgggtcatgtgcttattccagagaaaatgttatctcctaatcttgagcaatccctcacagcaactgaacgggaagtgcttaaccgcattgcactggagatgaccaacaaggagattgcacaggatctggcgatcagtccacgtacagtggagtatcatataacttctattacgcagaaatttggtgttaagtccagagttggtgctgtagtgaaaggctatcaggcagggattctcggtgacgtaacactccctgagaaacggtaaaaacatgtaccactttaaaagaacaacaaaagagcggcagaacaccctgtaatacaacctgaggtttgttctgaaccgctcatctgttggtttactttcctataaggtgcattcatgcttgatgcgtgtgctccctatccacgctgacgttcagcaatacgagccgtgattattccatgactctcctcgatttcttccggtgtacacgcggcttttaattcatatactttcactggcgaacgatcaatgatatccaaaaatgaatcaaaaaaggtcatgtctttactatggatgtatggacaccaatgatctgccaaccctacggtttcatgaatatgcacgccaaccacgtgatcaatcaacgtgttagcctcacgtacattatcgtacagccccattcgatccatcatcatgccgtgaccaatatcgtaccagagaccaaggggcgcgcccttcatttgtccaataatcgttcccgcttcgttcaaagtcggcatctgataacagcgtgaacgggtctcaataccgaaattcaccccgtatccccgctgctccgacaagttacatacctcttccagactctcctgaataaggctcaggtaatgtgcgctgccatcttcccgcttctccagcatctcttgccataaagattgatatgccggtgaatccggtccttgatcgttgtatatctttttcaatacttcatctatattgtattcaaacggaacctcaccgggatgtacaacaacagccttggccccataacgatgtgcgtactcggctgagcgaagtaacagctcaatcgcccgtttgcggcgcggttcatcattgaacccaagcaggacggaatccgtcccgtaatccggatcagccacatgcggaaatgtattatgcacactggatacaccgatctcgccacgttcaatcatcggttctatcgtctgcagcatctcttccgtaacgttataattcagttcaacttgtttgaatccaagagacttgatctcttcgatcatgccttgtccgttcgtatgacgtttgatattccaacatgttgagaacgaatattcctgtttgtccgtatacatcattggttcctcctgtctctcattctatcgcccattcatattccatttatctctatctatataagttgaaccaataaactttacactagatcactccaattgcagtaccatcttccgatcgctgttatcccctgatttttttgatccccttctccaaagggaaaaatccggtgatagcttatgcttccgatgcagctttcttgcagaaagctttcaggcaaacgctccgcttcttcagatcggttctgcactcttcgttctcgtgtaaatgttcagttcatcttatatacctatttattcctcaaaccgttgtcttcacgaaaagtcaattcaaatctcatcttgtttgccgtcttcccaggcatataacgatagatgatctccgcatgattcacgtacattaacacgaatggttcaggtgcttcagccttcacggtacacgcaagtccagggaactgccataacgctgttgtaataccctgctgacgaagggatggccctctgatttcaaaataaacgtcgatctcttccgccgtatccagctccacatcaatggttaacgaatctggcgtgaggtccgcatcaaacgttattccgcgcagatggctgttccacccctcgcctacctcacggcggatcaagcgaagataataacgttcccccgtctccgtctgccagtggatcgtggctggatgcatctgtccattcgtattcacacttcccgacatggccccgatcatccgatcttcaccgatccaagctttggctgtacacagattccgattggacgttggatcattgcgctcacacagttccatgaactgtttctgcacaagccgatctttttgatgagccttgaaatacggcacggctttagcgggcacatccaccccaaggagcgcaatcagtggatcatggcctgactcacagttgattcctgccagatattcatacccttctccaagcaaaagatagataaatacaccgatcgaactatgctctcgcatctccatgtcgtacgcccgggagaacgggccggagagattctccaggttggcattgtaatatagcgcaatgttattccacagcccatgttcaatccggtgtccaatttcgatcaaacgttccttgagtccatactttcgatacatgccgagcacggacagatcaaccccgtaatacgttgtcgtattgaattccgcgaatgtaccgtcgtattgttcgaactccttcaccaatccctccgcctgttcatccgaatgccgaatccattctgttcggttcaagcgatggccgtagtagtgggtaatgaaaatatgcattaactcaatattcgtattcatggggattacgtccgataacctgcgttctattgacccttgcacagccaactccatcgcatggtccatccgtttcatgagtgtctccggcataagttcggcgaattcggcagtcacaaccacacagacacaagcgataaactcgcgccagttgggatcataactgatccagactggtggcagaacctgattcactgccgaataaaaaaggtgtttcagttgtttggggtctgctgcctctgttagcagagaaccctcttcctgtagtttatggataaactgcgcagacaccttctcaaaggtgcgttccaggaaataggccgtgcctggcgcaaaagatttccaagcatagtgacccgctggtggatgcacatcagttggtcgggtcgcgaaggttccgtgatagatctcatccggagcgtcatattgaacatcgaacaccttgtggaacacccgtatcgcgcgttccacatcaccaggctcatttcgaatcagcaacccgagcgcataatgtgcactggctcgtgtgctgtgctgcgatgaatcctcctcttcgaaactccgaagcagatccaattcctcatcatagaagttatccatcatcaacatggactggttcacaagatattgctgctctttcgacatcttttctaccattcgttgtgtcatgtcatgcgccctcccgagactataggtgcgtgttcaaaaagatcagttttcagtaccaagaagatggaattaagctagaaatagagtagcggagcgtaggacaactacgtgagcaacggacatttcggctgaatttcatattcgatgctgatgatgccactaggcatcattcgtaatcaaaagtgaactttttgaacaacctctattaaccttttacagcacctaccattacgccactaataaagtaccgctgcaaccacgggtacacaagcagaatcggtaacgttgagaatataacgctggctgctttcagactctcaggcaggacttgaacagcaccaatgccttcgttctgcatcaattctgtaatctggttttgctgaatcatctgatacaatttcaattgcaaagggtatagctcaggcttcgtaatatacatgagtgcatcctggaaaccattccatcgtcctaccgcgtagaataggctcagtgttgccataaccggaagggatagtggcaaaataatgcgcataagtgttccaaagtggctgcttccatcaatgcctgctgcttcttccagactttcgggaatacctctgaagaaggtaatgaggataatcatataaaacggactaatcaatccaggcagaataagtccccatgtgctatcaagtagatgtagatttttgatcagaatgtactcggggataatgccgccactgaagaacatcgtcaccacaatgacaagcatgaaccacttgcgcccttttagattactcttcgccagtggatatgccgctgcaatggtcatcaccatgcttagcaccgtactcaggacggtcagccaaatggtatagataagggaacgaatcattgatccatctgcaaataccttggtatacgcctcaaaggacaattctttggggaaaaaggaaacttctcctgaaccgatcgcccggttggaactgagggagatcgcaataatatgaatgaatggtgcaagacacaccaccatcgtaatgataataagaatgacgtttaccgtgttgaatattcgattcgccgtgttttcagacatctcactcactccttacagatcatatgtgaatcaatccactacataatgctctcatcggttaatttcttggacgtatagttcgctccgagtatgaagacaagtccaactaatgcctggaacaaacctacagctgttgcgagcgtaacctgaccagattgtaaaccgacacgatagacaaacgtgctgagcacatccgagtattcacgtacagccacgttaccgataataaacggtcggtcgaagccgatagagatcatgttgccgacattgatgatcaataaggtaacaatcgttgttttgatgcctggcaaggagatgtgccagattctgcgtagccgacttgctccatccacttctgcggcttcgtagagttcccggttaatgcccgtgagagatgccagatacagaatcgtaccccagcctgcactctgccacacgcctaccgcaagatacgtgaagagccaatagtttttgtctgaaaggaaaggtaatggatcaaatcccatgctcatcaagatattgttaataaaaccggattgtgtaccgaatacctgaagtacgatccctccaataatgacccacgaaataaagtgaggaatgtacagtaaagtctgtgccaactttttgaaccaggccttcttcagctcgaataataagatggctaatataagtggtgccgggaaggagaccagtagatccagcatgttaagcactaacgtgttgcgtaatgccgtgtagaatccctgattttgaaacacttctctgaatgcatccaagccaatccactcactaccggcgatcccttgaaagaagttaaagtccttgaacgcaatctgcacgccatacattggcccatacttgaaaataatgaagtagatcatgggcagtaggagcaacgcatatagttgccagtttctgcggaaatagatgcttgttttcatataccttccccccatgtcattcaggattcttcatcaaggcgatgttgccatcgccctaatgaaatccctgttctttgttgtcatacacattagatgtgatctctactctacttatttcatcgctttgtaagcttctgtacgttcatccaggattgcttgaccaccgctcgccatgtagtccttcatcatgctgtcatacgtagcttcaaaatcagcgggtttggaaatggttgttttcacgaaaaactccataaacttgtctttcaagccgttaccgtaacgtgcttctgcgtcaatcggtttggagaaacgtaccggttgaatggtgtccgtgttagagatcgctaccgacttgcgcatatcatcccgatacttcgactctacctgtacgacataagcctcttcatttttcttgtcatctccaacgtatttaccattgacgataatggcaatgtcaccggaattatagatacgacctgcgatttcaggagaagcatcatctttgatcagtggaactccatccacgagctcatagttctcgttttcaacaccgaattgcagatcgaacaggttgttgcccgaagccatccaatccagatacttcatcgctgcttccgcattgttgcttgacttcggaatcatgacatacatcgcattgggtgcataagccggtttggcgaatttgccttcggagtttttgaatgcatcaatcggtgtcatcactgcaccaggttgattggtttgcaggtttttgtacgtaccggagatataaatctcccctgcatcctcggtgtagaatccaactttgccgttagatacatcttcccacagctttttcttgtctttgtcgagtccaaagtccttgctcattaatccttcattataaagtgtgttcatatattttagggcttccttgaaaccaggcaacaacgttggatagtcattagaacccagttgttgcgttaatgtatatttctgttcttccgtcagcggttcaatgaatgaccagatcagtggttcatattgagccgaggcaatggacatccccataggaataagtcctgtgccaaccttacccggatctttttccttgaaggccttcagtgttgtatgcagctcctcagctgtctcaggggaaggcaatccaagtgcatccagccagtcctgacgaacataggatgcgtacttgccaagtacaagacgtttacctggaaccgcgaactgttgtccatcgtattgaccgtaggccagcgtttcatctcccaggaacttcttcaggttaggaccactttgattgatcagatccgtaagttcagtcagacctccttgctctgcataccggttgaatgttcccgaatcgtaggtaaagacgatatcaggtacttcagagccactcgccatcagaacgttaagtttctgtacttcctccgagcgcggtaccggaacaaactgaacatcgatgttgtttggatcaccaaacttctcttgaatgaagcgagtcagataactgtccgaaatggtgtagcccgccggagtgtttccccgatcgaagatttctactttcaaagtcgttttttcccccgaacccgactctccagaggaagatgttgattcgcttcctgatgaacatgcagataataatagagtgaatgctgttaccactgcgaggattgaacttaccttgcctgccttacgtctttgaaataatctcatttgacctttcccctttcgcacactctctgaatggattcacatgtttgacactccactttgttcatcccattttgttgcacctgtgaatgtcactaatcattacataagatctgatatttagacaataaactattttcaaaatgtagatttcacgtttttcaagttaaataccgcgatatataaacatatttcctgacaatatacaattttcacacttttaatgttaactatattaacatattatgttgtgttaagatcgatttctcatacccaatctggcatcatccatcttgcaataatcttttttccattaaatctctcttcaaaaaatgaaaaagagaccacattttatgtgatctccttgtttagcaacacgtgtagaacgattcgacgcactaattccttggcggaagattaaacttcatttgaccaaacaacgtatcgatggcatttcccgcaaattgatcgataacatgttcgttgcttgtgtccgtatgttccaaaatcaacacattatacttctcatcataatgcattccgcccaaaataaatcgtactggaatgttctgagctgcccctgccttcgaaatggcctgaataagttcggattcatgcctttgttgacttgtcgtgtaggtaccaacaggtatagttatcgtataagacgagtcatctacatgaaatgtaaatgtgttgttgcttgctgtaatggtaacccgtttactgatatctaccgatccccacacttgctgtccgtgtttgtacaccatcttcactcctgccctattaatctatgaattgtcatactgctagtataggacattcgtaaaattccttaacaacatatcagccacactggcctaagatcgtggttgaacagccaaaaaatctcctgtaaaggacgataagggacaaaaccttattgcctcatacaggagatttcattgatatctctaagattattggatttcacccgatactcggatgttctaacacgtgcaattccgttattgatccccttgttttccaccctgcttgcggtagtctcctggtgtcacgcccataatccgtttaaatactctgccgaaggaaattgcattggcgtatcccacttgaagagcaatatcctgaacagccatatcggatgcagacaacagacgacaggccttttcgaccctcagtttcaccagaaaatcaacaaacttcatctcaaactcttccttgaacaaataactcgcatatttgcccgagatttggaaccgatcactcagatgtttcagcgacagatccggatcatcaaaatgctcttcaatatatatccgcagctcgttgatcatcgcgcgatgacttttcgtttcattaacagatacataattgcgataaacctctttaagccactcctgcaaaatctcttgaatgccctccagtgtctccacctgctggatatcactacgaagacgagtcagaatttcctcggcaaattggctttgcaaccgctcagacagttccccgaattcacgggacaacatctggattaacgtctgcagcaacatgcgaatatcgttatctgtaatctgatcttcgttaaacgcaacaaacatctgatccagctgcgttcgccaaccatcgccggttagtctgaattcacggacaaagtctgcgagcatctgcaaatacttgtacgattgcagctcaatacgatccggcagttgctcactgagaacgatcgcatctttaccaagggtaagtctatgctgcaaacccgcatctgcactcgcataggaacgagtaatctcctcccagcccgatacggttcgtccaatcccgaacgtaaaccgtaggcggaagttttccgcaatccacatatgcatctgcttagccagatccataagtaattcacggtccagtccttcctgctcatccgatgcaatcaccacaataagcctgcggttcccaaaccattcagcccaaccgccgaactgggtctcattctgcacaagttcttccactacgttcataagcgcaatcttcagaatattctgattggtcgagagatcgtcaccattcatctccgcaatgaggacagcaacactcttcggttccatgaatcgttcctctagtggttgcagatggcgaagtcgctgacggaacgaatccattcgctctccttccatcagatcaacaagcaactgtctgcgatgaatcagcaagttttcatgatgttgtttctcatagtcaaccgtttgagcaatcagatgttccagcgcacggtcgatgagtgccagttcatccttgacggatggtgctgcttcatcctcctcggcacgtggctgtaacgcctgaattcgattcatgatgagctggatggggcgtgtatttctgcgagtaatgtagattagtcccgccaccgcaccaacaatcgttaataaaccaataccgatccacacataagaaacaagggaaacccatgaatacagttgtccggattgaataccactctcgaagaccagaccaagtttgtccgcagtcacacgattaaggatttcacctgctgaagagtccatttgatgcgcggtatagatcagattgtcgctcttatcccgaacctgaagaacagataacttttcattggtcatgttatcaatctgccgttctactgcatacatgcggatggtaatgacgagcagtccttccccgccccacggtaaaggaagccacttattcatgctaatcacctgtgaaggtacgtcgaaggaacgttccttataatcacgtggcaagttccaaccgagattctcccgatgtttcaaggcttgctcaatataggcgcgatcttcaaaatcttccaaacgcatcatgcctctgggcgtaagaatctgggaatcggacatgcgatagagataaatggattgaatcatatcctgctgatccagcatacgtcccagcccacttgctgcatcatagatgaattgactcgataattgtccctgttcagcttccagaaagcgactatatgttttgttcgcaccaatgtcttcaagcaagcgaagttcaatgtcgcttagcgatcgctccagtgtatccacgatatagcgggtggagatcatgtcggctttttgtgtttcgttacgtgagagttcgttgacaatcaggaaggagagaaagatcagaatggaaatcgtaagcagaaaaataggaaaatacgaatacatcaacttggtgtgccaattccgcttcagatttactttcataggctccaactccttccatctctattctaatgagtatgctcttctctgttctttggcctgcctgctgacgatatacagaatcactgatcctagtgccgcactgatcgtgcaagccagatacatcagtgatggaccgccggaatcgagtaaatatccgttaagcatattaccaacaattccgcccaggccagcaaacaccatgttaaataaactttgtcctgtggcctgcatttcccgtcccgtaaccgaagccacatattccactgctgcgatataaaagaatccgaaggataacccatgcagcacctgaacgccaatcatgacctcaggcgtcggccatagccattgtatcccccaacgtaacatataggcccccgctgcaagcagcatcgtgagttcatgcccccattttcggagtatgaatgccgctgccaacatggatggaacattggtaatcgacgcaagcaacaacgccgtacctgtcatggttacagaaccgccagccatctgaaatgaaataacaaaaaaggagttaaacgcagtgagcgtttggttaaccaggaaacaacctgttagaaatagaaggaatgtccggtttcggagcaatcttgccaaacctacggagaaggttaccgaggacgaggatatactcgtctgccggggaagtgtacttgccagtatagcgctcagaatgttaaacaggagaaatggcaaccataacatgtgaatggaaaactgggagagatacatccctgcggcaaatccaccaactcccgttcctatgctgccgaagagtcggatcatgccatatgaggtgttcgcggctctcgcagctgtaaccgcataggagtcagcaacgggtatttgagtcacttggaatatagtgcataaagtataaatcaatattaatataaagtacacttgaatattgtagaaatacgctaacgatgcaggaacaagcaggcttatcaccagtacgaaccgtgtctttttaaacttatctaccagaattccccatataggttgaagaataatggatacaagtgtgccaaacgccataataaatccggtttctttactggaaaacccttgtgctaccaatatgggattaatgtacgggttaaacatcccaccagcaagccccataaacagatataggccctgtaattggagtaaaacacgttttgcatcattggaatcggcttttattttctctgtgtaagccttcatatgtctacttctcatccggatctccatcctttatttctgtagttgcttcgcctattctctatttttatgtgcgtgtcagactcgacttgattgcagccaatgcaccgattgctcctgctttgttccccagttcagctacagctagaagtgtaggcagaacagtgtaacgttggaggcgtgtgcgcacttcatttagataataagatggattggatgcagccacgccaccaccgatcactataatggaaggattgagtaaagccgtaatattcgccagacctctcgccatataacgcatgggtagttccagaatctccagggcagcaagatcacccgactccgctgctttgaatacatgcctggcttcaatctgttccgcttcccctcctgccagactcatgatcagggataaggaactcccctttccagcagcaaaataacgcctcgcctgttcggtaattcccgtacctgaggtcacttgctcaaatacgccaaaggaatccgcatccgcaacgtaaccggtataaagcccttcgtctcctgcaatgaaatgcccaatctcacctgctgctccattctggccgctatagagctgtccattcaggataagagcagatccaatgcctgttccaaccgtgaccattacacagtgttgatgtccctgtgctgccccttgatcatattctcccattgccgccatattcacatcattatccaacatgatattcccgctgtagtacttcgcaataacagggcgaatatctagctcaggccactgaaaagcgggagcatttcgcagtatcccctcctcttgcagaatcacaccagggaatcccaagcctgcacctttaagttgatccagactgcatccaacttcgcggcagaatatttccaattcagcgaataaccatcggaagaactcatccggctgatcactggcaagcgtaggcaagatacgttcatgaacttcatttccagcctgttgtgatgacaagagcattaatgttttggtgcctccaatgtcaatacctgcaatccagccggatagatcacctccaaccgtaccattctgattggtctgatcattattacttacgtttttcacggattctgtcatgccttttccctcctcacatgttgtatatccaatctcttattccatggcttcctgctgaaggttcagcatcgtttgttgtacggctacctgaaccgcgccagtgacaacagcttgctcaccaagcttggaacagattaactgtggttgcacagggaattgctcagatataatctgcctcagtaaaggcaataacacatcaccgttccctcctacacctccgccaagcacaatgagatccggtgcaagcacaacgctaatctgacgcagagcggaagcaatcttcttgctgtattgttgtagaatgtctaacgcctctacttctccactacgcgcagcttcaaataacctctcgggagtcaggtgtctgtgaagatcatctgcacccgaatcatcagcctccaatagttcatcatgctgatctagataatctttcgccagttgcatcagaccatcagcggacagcacttcctccagacgtcggccatcgtccaccagcatctctgcgatctctccagttaagccacctaaacctcgaagcagttggccatgtaccatgatgccagcacctgtccctgtaccgatggagaagaaaacaaacaagggatatcctgctgctgcaccactccgatactccccaagcgctgcaagattcacatcattttccagaattacttcacagggaaaagctcctgacaacgattctagagagaaagcttcttccagacccgctaacgggtccacaatacgattgatacaccctgattcaggcagcactacgcctggtataccaaacccgatgcactgaatctgatcccagttcagatgattctcatcaagcagttcgttcatatggcttcgaagaagctccaacatcgtcgcttctgctcgctcataagcttcttgaacaaccatgggatatgttcgataggcaatgatctctccattcagatcggataatgcaatccgaatacgagttgcgccgatatctatcccacagacataataagccgtttcgttgaaacgaatgagggttgcttttcgaccctgagcgttgtcagctggccccatttccctcaccagattacggttaatcagatgttcgattgccaaagatactgttggtttactaagtccggtctgacggctgatatccgctctcgacatggttccctgagttatgagggcatccatgataagattttcattcagattgcggatatactgcggtgtgccagccatgttatcgcctccttttatagttagcatttttcataattcgattaaagtcgctctcgggtacaaaatatagacgaataacaccgtttcgatctatatcttgctgattgtaaaacgctcctggaaattatgctaaatgcttagttagttaggtttattaacaaattgattaaattcaatatatcatcgtgtttggtaggtgtacagctttttgtcattgcactcttttagtagaaagttttactagaaagaactaaccttcacctgtaacacagaagcctaataaaggaattattatacaataatagacgtttatacatttccgaaacagtgacacgctcatagaataccttatcacgatcagggaggttttaatatgtatagaaaacatcataaatgtcatcatccaagaccaaagtgtttttacaaaaaaattacgaaaacttgtgttaccaaagttaaatatgtccctacaaagtgtaaaaaacactgtcatgtcactgttgaatattgtggagtcaaaaaaagaagacattactaatactcttttgcccttctcttcggagaagggttctttcttattgaactagattaataccggataccattaacctatcaaaaaaagttgcggtgatattcaccgcaacttttttcttccttatatacatatattcatcaagttttagagagttcaataaatccttcaccgaaaacatcacgcacgtcatgaatggtgataaaagcaatctcatcttctgctcggacaatcttcttcagcattgaaacttcctgtttgctaatcacaatgtatagaatttctttcttattttttgtgtaatagccatgaccggacaggacggttactccgcgatccatcttctcaatgacttgctttgcgatttcatcctgtttggaagagataatcatgactgcttttttcggattgagcccttcaataatgaactccattgttttggttccgacaaacagcaagacaattgtacacattaatccttgtggtccaatgatgaagtatgaggagaaagccacaatcagatcgaagaacagaagtccgtaactgatattccaatccagatatttgttggcaagtcgggccaggatcactgtccccgccgttgtgcctcccactctaacaatcaagccgataccaagaccggcaaataatccggcaaaaatggtattgatccagagttcatccgatgcaatcgtccaactctccgtcagatgcaggaacaacgaattgaataccactgcaataatcgtatataccgtagtcgttttatcaagaaaccgatatcccacaattaacaaaataccgttcaggatcaagttcatcagtccaggggaccattcaaacaggtaatacaaaataatcgtgatacccgtgacgccgccttcagccaaatcgttcgggatgacaaacaggttcaccgccagtgcaaacagaaatgcacctgccataataaataggatatccgtaattcgtttcttcattatgcattccatccaatccatcagaaatcaacctaatcgacccgtctcataagttgtcataatcactcaaggatagattttaccatgctcacaacaaaatttgtatacataatacaaattgttgcgtaatttgtgcaaaggaattagtaaaacctgctcttctgtcttctgcagagctattgagtatcatacacccatgacaaatgtcatggtccatcattgatattcatcattacagaaggctgacgtttatgacttactgtcatgttcggattgttttacaatgataaaaacgcttcctacaggaaagtctagcgggaaacgccaagttgtagctgattacagttataacgattgaaggaggacacaattttatgaacagatcaaaagaaatggccttaaaaaaagaagttaccccttacgaaaaaaatgatctcagactaagtatccgccagttaatcaatacattgctcccgctcttcttgttatgggctgcagcttactttagcttatcggtttcctactggctgaccttcccgattgccttggtggcatccggatttgtacttcggacctttattattttccatgactgctgtcatggttcattcttcaagagcaaacgcgccaatgatattctcggtaccattactggtgtattaacagtgacaccctatcagcagtggaaaaacgagcattctatccatcacgcaacaagcagtaatcttgacaaacgtggtgtaggtgatatctgggttatgacagttgacgaatataaagaagcttctccttggggtcgtctcttctatcggatttatcgtaacccgtttgtattgttttgtatcggacccatttacgtgtttctgttggcttaccgttttaaccgcaaaggtgctagacgtaaagaacgtatcaatacacacctgactaccgtattgatcgttgtgctctatgcattcatgtcctggttagtcggatggcaggcttttgtaatggtgcaagcacctatcttcttcttctccggtttctttggtatctggctgttctacgttcaacatcagttcgaagagacgtattttgaacatgaagatgagtggagttatgtaaaagcagctgttgaaggcagttcttattacaaattgccaaaattattgcaatggatcagtggtaatatcgggtttcaccatgtgcatcacttgagcccacgtgtacctaactatttcttggaagaagcacataacgcaacaccacctttgcaaaaagcaacgactattacactacgttccagtctggttgccctgcgcttccgtctgtgggatgaagattctaaacagtttattagcttcagacagctcaaaaagctatcccgcaagccgtatgttcaaccgcctatccgagtaaccaatccagcgggtctgacagagaagccttaactctgtcggattcgttttcttgtgttcaagccatagtcatgctacagtcatgctaaagttgagtacaagtttgaggaggagaattccattcaaaagtggatgcaaaatttttataaaaaaacagggttgaacctttatgtatggctcgcctttttcatcctgccattctattttatatcgcaatattctaaattatggacgatggtaaccggcatcatcattatcctcgttttcttcgtctgttacctgctcgccttcatcaccaagggctggcaggtgtacatgtggattggaatgcttattgccatatccattacgatgacgatcgcctatgattatgcctacttctcattgtttcttgctttctttattgggaatattaaaaataaagccggtttcttcactctctactcggtgaacctgggagccagtttcgtaaccattaattacggtttcattaatcagagttctctgttggtgagccaactcccgtttgtattcatcagcttaatggcctccatcctgcttccaatcagtacgtataacaaaaacaaaactgaacatttggaaggccaattggagaatgcgaacaagcgacttgatgatctcgtaaaaatggaagaacgccagcgtatcgctcgtgacctgcacgatacacttggacagaagctctctctgatcggtctgaaaaccgatctggcgagacggctgctccgcaataatcccgatcaggccgagattgaattgaacgacctcagacaaacggcaagtacagctctgaaggaagtccgggaaatggtcaccaccatgcgtggtacacaattggtcgatgaactgttccgggcggagcagattctgaaggccgcttcgattgaatttgtgctggaaggtaatccgaagttacaggatacgtcacaattgaatgaaaatgtgctcggtatgtgcttgaaagaagctgtcacgaatgtcgtcaaacacagtcaggcaacaacctgtactatcatcattaaggaaacactagcggataatgtagtaaccgttcaagataacggtgttggaatagaacgaactcgcaaacaggatcggcgcggaacaggaattttgggcatgaaggaacgacttgaatttgtgaacggttgtctggatattcgctctgcgacagacatcccgggtacagcgatcattattcatgttcctaaactcgttcgcaaaccgataaaggaggcagaatcatgattagaattgtaatcgcggaagatcagcgcatgatgctcggcgccttgtcctccctcctcaatctggaggaagatatggaagtcgtcggacgtgccagcaacggccaggaagcccttgcccttgtccaggagcttgcaccagacatctgtctgatggatatagaaatgcccgtgaaaagcggccttgaagctgcagaagaactcaaaggaatgagctgtaaggtcattatcctgaccacttttgcccggaccggatatttcgaacgtgccctaaagggaggtgtccgtggttacctgctcaaagacagtccaattgaagaacttgccgagtcgatccgccaagttatgaatggcagacgcatcttcgctcccgacttggtagatgaagcttatgtagaagaaaacccactgacagaacgggagaacgctgtactaggcctcatggcagatgggaaaaacaccaaggaaatcgccgggcatctgttcattacaacgggaacggtgcgtaactacatctccattattctcaacaagttaaatgccagtaaccgcattgaggccatcactcgctccaaggaaaaagggtggtttaaatgaaagtaccgctttaacccattgaaacaaaaataagcatgtaccccggctgcataagctgcgataacatgctcaaaataaaaagcttggcccagcaatttcttcctgggccaagcttttttaggtgtatcgtaacaatcccacgctcatttcttctacattgcaggataaccgtagaatacttaaggtttcacagatacaaccatgccaagagcttctaacggcacttgatcggtcttaagctgatgaatttggttaccgtcctgccatgagatcgttacatgaacagactttccaccacttggatattcaaccttgatataccctttatctttgggtactggcaaggtatgtgactccaggtactccaccattttcttcgctatgcccggattattcatttcatcttcggataccgaacgaatttccagcgtccatctaccttcttgccaagtcagatattgactgcctgcggcaccttcactcatacctttgataccatgtcccagatccacaaccatatctgctggaatatctttcaggtccgtctcagggaaaatttctgactgattcgggtccttataggtcttcacttcataggaagcccgtacaggtatcttactatcggatgcagataaagattgatcattaatggcaacagactgagtggtagcgtagaagtttaccttaaatgcatccgcagtattggacagtattgccgcccccaaagatgtacccttatccaatgtgaatgaagtgggtaatgcggcatccttcatcttcaactggttgcgaacttccttgatcacatcattcacacctgattgaccagtgacaacttggttgtcatttgccttcgatcctgatgtgtcttcattatctgttgtgtccgtattctctttggttcctgtttcattttcattagagaaatcagcaccaccactgccggtctcggtctgctcacctactgttgtcgttggtgaagaactattctctgatgatgctgcatttgaatccggtccgccacatcctgccagagcaagtaaaaccgctgtcgttactggaatcgtgatccataatggctgcttcttcatgatgtgtacctccttcgttgtaaccaatctaaaaattcaaatgattaacgcttgtcgttccagaagttaaccggctgcatttttttgcttaatacttcaaaacgatacccttctgccttcaatgttttcaatacttgcggtaatactttcagcgttgcttcctggtcgtgcataagcacaacaggtgttgttccgctcttttgcacattgtggatctgcttcattacactgttatagactttctggtgatctttcttgtatttccagtcttccgagtcgacattccaatcccatagatggaatccaccctggcccagcagtacattacggaatgccggtttgagataaggtttactaccatatggcgtccgcacgagacttgttttaactcccgcaaccttgttcagacttgcattggcctgttgcatttctttcaatccgctatatgcagatttatagaatttgcctggaacgtgagtcactccatgcagacccaatccatgcccgtcagctacgattcgtttggttgccttctgaaattgctccatttgaggccccagcatgaaaaacgttgccttcgcatgatactgatccagaatatccagtaactgacccgtatgagcggttggcccatcatcaaacgtcaggtatatgattttcgaatttgctttgcttgctccatccttggatgcagcagatttggcagataccgactgcggcaataatagtggaatgattagtaaaatagcaagtgtgaccatgatagatttacgaatatgtagcataattaaaagtctcccttatgtgttatatttccccgggtgtccatgtttttctaccttcatcccttggcgatttatcctaatactatcaaagatagtggctcctgttctcgctccaaaggctacggtagagttacacttttgtcagataaacctaaaatttaatacgaatttgatagatttgcgcaaaataagatcccgccaggatagatcaattgtgacatatcctctattacccatattcagaattttgatagacctttactccagttcaagcaaatctatacaatcattaaatatcgttgcatgcaaaaaaacctgcacaagtgcaggcttctttgtcttcaatcagcatatggcatcaaaccatcatcccttgcaaggggattgcccccattgctttcaggatcattacctcatgctgtatgtaaatggtgttttgacgctggaatcttctcgactccctacgtgcaatttattcagttggagcagtgaacgaacgtttgccaaactcggcatccagcatgtagaaggcattgctgtctttttcaatgcggcgcagcttctgaataatattgtcaaacaaagcttcctcttcaacctgctcatcaatgaaccatttcaggaaatacatcgttgcatgttcacgttcattcagagcgatgtcagccagattgtagaattttttcgtgttttgctgttcatgagcataaccatgctcaaacacatccagcatcgaagcatattcattcttcggttctggcaaagcctcaagtgtggcacgttgcccacgatcattcaggaatttgtatattttcatgccatggaatcgctcttcttccgcttgcacgatgaagaagttcgcaaatccatccagacttttgctggaacaataggctgccatagccagatatacatgagcggaataaaactcaaagttcatctgttcatttaaagattctgttaacgtttggctcataatcaaaacacctctttctttctctagggatggttatattctaacataacgtaagcaggacttacaccgattttctacaaaattcgccaaggactgaacgaacaaaaaagctctgccgcgatggcagagcttctttcattctttagagatatgcaattataccaagaacgctttggagatgataaccaacaggatgaacagaaccagaatggcacctacagaagtgaaacctccgtatccgtagcctcttgtttctccacctaatacttcgctcattgaccgtacctcctctgcaacaggtatgggttatcttatgcaggaagaacgactttgacagggcggatgccctaattattcagattgctgtttttttcgttcagtaccggggagattgcacacgcatgatatccagaaaaggtaccttcgctgtgaactcttcttcggtatactctacatgtacgagtcgtgtacgggagtccattttgacgatgactccttgcacctgatcttctttgccccataccgttaacagtacttccgaacgttcccgaaaagcttcaaccagctggtttcccaactcttcaagttcaaactcatcccgtgtaggtctttttgctacttttgcttttgccaatgtggctgcctcctctactccgacgtcccgattccacgggttgattgccgagttcatattcaataagtataccattcatttacgttcgtgtaatctcatggcaaccagaatgagcaaattcctcaggcaagttaccgttaaccgtgatacctcctattcttctctatactccacaatgatgctgtactcattcgatcgggtttcgccagcccgtttttgtccattccattcatacgtgtacctggcaatcaagtctccttgcagcgtccccaccttctcagaagctaacttcgctacatacgagatgttcttttccgttccaggctcaatcacgcccacatgcagaacccgtggtgtggaatactctgatatgctcaattggagctcacccgtagcttgaccaagccatctggcaccctcaggtaaaatgctcccaagttgtacacgtgccggcaaattacccgtattccccacacgtacctgaaaagtgacggtacctccctgctcgaccaatgtgggtgtcacttgaacataagcctgaattatcggcgctttcaattcgaccacagcttcattggatgtaatcatccgctgcactgaccgtgaatccggcaatcgaaatgtatacattaggctagcatgattcacatacctgtagtcatcaggcagcgattcatctcgatctggaagtttcgcttcgaactgaatattcagaaccgaccgggctgtcaacgtccccagattaagccctttagccagattggttccgggacgtttaaccccattccagcgcaggctgccttcgacaaatgtcacacctgtgggcagtacatccaggagagttccatccaccgcataactgcttgcattggagacggtaatattatattggacgacatcgcctaatgtggccgttaccgggagcacacttttcaccacagagacctggggctgtatcacttccagggtaacctgattggagtagaccgtctcctgctgtcctgccgagatatatgacagtacagctacacttgatattccgtttgcatcgcttccccccgtaacctgaacccgatattgtatcctaattgagcttccgggtaaaatctctccaagttgtatgcccgtatcaggcgttacttgtggcgcaaacatttcatctacgatgacactcgcaggtataaaaacaatgccctgtggcaaagaaatcgttacttgggcattggtggctgcaataaaacccggattgctcacgatgacggtgtacatgacaatatcccctgagaaggtatagatgtgatccgcctgaaaggagatctccagccgggatgagaccagattgacctccacgatattggattgttccatacctgtaaccgttctgccttccggtgtcaaaaactcatagttaacctgtgcctgattcagcagcttcagtgtctcaggtaaacgcaagattacaacttggaagtggtatcgcaacgtggctccgggcgcgatttcagctggaggcaatcctctctccggtgatgctcccggtaacggaataccatcacgcagtacactgttgggaagcagtgccgtctctgcagatagctgatccaataggtacactagggccgtaagatttccggtgttaacaatttcaacacggtagataagagactgccccaaggcagcctccgtgacattgcagacttttctgacttcaagcctggggccgatccacggtgttacaaccgtattcgaataggatacctgttccagttcagtcgcacccgagctgaatcgaaccagggactgattctttagccagtgggacaacggaccggaagattggctcatatcaccacaacctctactctgaatgtaaccgtaacggaagcacccgcagcaatcgaaccaagcgtgatgcctgtattcggattccctgttggtcttggcacaccatccaccgtaacacttcctggcacaaatactgtaccgacaggtaccgggtcaaccatgaccacattattaaccacttcaatgccgctattggttactacaaccgtataggtgattacatcaccaacaacagcatcaatggcacttgtacttttggcaacaacaacatttggtgcagataccgggataaccagaacattcgaagatacggtccccgtcaacagacggccatcgggtggactaaatgtatagttggccaccgcctggttaaccagttgctgatcctgtggcaacgtatctacagtcacttcgagggtaaccgttacaataaccgtacctccggacggtatggtacccacaacgatacccgtctctggattggcacctggctgtggaacaccatcaatcagaacactgttgggaagcagtacggctccattcggtatattgtccgttaatgtcaaacttgcatcaagattcccgctattgttaatggcaaaagaataggtgatggtgtcaccaatcgttgcattggaggtgctccctgttttggttacggcaataatcggctgatagattggtgttacaaccgtattggaatacgctgctcccgagaaaacacccgatgtgaaacttacggaagactgactgctcacttgtggtggtgttggaagcgtattaacccgaactgcatacgataccgctatcgatgctccaggggctaaactaccaagggctatgcccagcgccgggtttgccaaggcccgtgggacgccgtccaccagaacactgcctgtaacaaatgtggtggctgggttaatcggatcggtgatcacaatgttgtttaccgggtcaattccttcattggtcacaaccatctcgtatacaatcgtatcgcccaccacagcatcaatcaccggagtggtcttcacaacgctgacattcggagcagatacttgaatgttgagtgagttggacgtaatcgtgcctccaagtgttcttccatcaggtaatgtatacgaaaatgtcgcagaagcctgattggtaatggactggctcaaaggtaacgtcacaatcacaacggagaaggtaactagagttgttgtggaaacgacaccaagcggaatacccgaagcaggatctgcacctggtgcagaagccccgttaataataacgctatttggaacaaactctgttcctgccggaatggtatccgttaacgtgacagatgccccatagttcccggtattggaaatagcgatgctgtacacaacggtatcccctaccgttgctatcgtctgatctcccgttttgactgcagccagaataggttgaaagaccggagttgtaaccgtattggagaatgtggtcgctgagaaagcccctgatgtaaagctgaccgtggactgattgtttaacactgcacttgccgggagcgccgtaacctgcacactaaatacaacggttaccgtaacgccaggtgcgatggaaccaagcgttattcccgtagaaggattggcaccagggcgcagaacaccatcgacaaacacgccggttggcgcaagaacggtacttgtcggcactgcatccgtgaaaaccacattgttgaccgttgcaattccgttattggttacagcgatgctatacgttacgatatcaccaactgataccgccgttgaagttgtggatttgacgacatcaacatccggtgccgatacggtaatggtcaacacattggatagaacagactccgtgatgtttcgcccatccggcaatgtatatgatagagccaccgaagcctgattcaccagttgttgcggacttggcagcgtatcaacaactactgaaaaggtaatggtggtcgtagctccgggagccacattacctgcggggatgcccgttgctggatttcctgctggcagcggttgaccgttcacaataacgctatttggcacaaggatggttccggctggaaggttatctgtcaggttaatctgggctccatagtttccctgattgctcacggttatcgtgtagctgactgtatccccaacggtagcattttgtgtactggctgttttttgtgctgaaagaataggctggtacaccggagtgaccacggtatttgaaaaggttgtgcttgagaatgtacctgaggtaaaactgaccgtagagcgattgctcaactgatcacttggcgggatcgcgtcgatacggatactgaatgtgaccgtcgcggacgttccgggccccaatgtaccaaggggtaccccacctgccggattggctccgggttgcgcaaccccattcactgtgacactccctgtaacaaaagaggctccagctggaatcgggtctgaaaactgaatattgttcaccggtgcaattccgctgttggtcaccagaatggaataggtcaccgtatcgcctaccgtagccgcagtggaagctgtgcttttgacaacagcgacgtttggtgacgagaccgggaacgtgagtgtattcgaagtggctgagccagtcaacgtccgcccatctggaggtgtaaatgtaaaggatgatgtagcaaaattgctaagctgctgtggggatggaagtgaatccacaacaacggcaaacgtgacaacagccgtcgcccccgctgctacaatgcctaccggaatacctgttcctggtgttactcccggctctggcacaccggatacaaccacactgttgggtacaaaagtagtcgcagaaggaatgttgtctgtgagagtaacatttgcttccagattgccagcattgctgaccgttaccgtgtatacaaccgtatcacctacagttgcatttacggtatttgctgatttgacaagtaaaatctgcggttgtatgaccggagtctgagtggtattggacgatgatgaccctgaaaatgaaccggatgtgaagctgaccgtcgactgattgttaatctgcgaaggaatcggcatggtaatcgtcacctcaaaagttacggtaacctcggctcctggagccaacgtaccgattggaatgccggcggtcggattggagagcgggaacgtagtcccgttcacaatgacacttccgggtacaaatggggtattcgaaggaagaggattgacatataccacattattaacggctactgtgccgttattacgaataacagatgtgtatcgaatgacatctccgactacgccgtactctacattgtcactgttgacaatcgtaacattgggcagagacactggaatagtgatggtgtttgatgacgagagaccggcaatcgttctcccacttgggagtgtgtaggcaaatgaagcaaccgcctgattaattaactgccttgcatctggcaaactggtaaccgtcgcaacaaaggtgaccgttgcacctgagcccgcagcaatctctcctagactgatacccgactccgggctgactccaggtgtaggtacgccattaataatgacactatttgtgctgaatactgctcctgctggaatgggatctgtcaaggtaaccgttgcagctatgttacctgtattgttaatttggatggtgtaattaaacgtatcgcctacagtcaaacttgttgtacttgctgacttcaccacttggatcactggcagaaatatgggggtatttactgatatagaagaagaaacaccgttaaaactgcctgatgtaaatgctgcattggcctggttactaaccaaacccgtagatggaacggaattcactcgggtctgataggtcacagttacgctgcttgagctattcaatgaacccactgcgattcccgcaacggggcttgcgctgggaacagcagatccattaatcgtgacactacccaggacaaattcagagccggatggtgcatccgaaatcaccagattttgtactgcactaattcctgcgtttgttgcaacaacggtatacgtaagcacatctccaactgtcgcatctggtgtgtttactgttttactaagagaaatattgggagccgatgcagatatacgaacgatattggataagctgctgcctgagagattccttccacttggaagctggtacgtataacttgctgtcccttgattctccagtgtcgggggagtcggaagtgtggtgagtgtagcgcgaaacaccaccgtagccgcaactcccggcaggaggctgcccagtgttattccggttaatgggcttgttccaggacgtgcagtaccattcacagttaccgaattcgggacaaacgtcagccccgctggaatcgtatccgtcacattcacttgagtcgctatattcccactgttcgtgaccacaagtgtgtatgcaatctgatcccccagtgtcgcattggtttggcttgccgacttgttgataccaacaacagcttggtatacaggggttgtaatggaattggagttggaaatgcccgtgaacgaaccagagctataggacactaccgctcgattaactaacgaacctgaagcaggcaaagactgcacattcacctgaaacgttaccgtcgcagaacttccggccgccaatgtcccaatagagataccactgctcggattcgcagacggtacaacagttccccttacggttgcactgccgggaacaaaagttattccagcagggagcgcatctgtaagtaccacattgttaatcacctgaataccgctgttggtagtaactacggtgtacgtgaaggtctccccgacagcaacatcggtgactgatgctgattttaccgtggtcacattgggcaatgttaccggaatcgttaaggtattcgaggcgatgtttcccgtgatcgtccgaccatcaggtgaattgaaggaataagaagctgtcgcctgatccacaagagtcggcggtgtcggcaagcttgttacaagtacctgaaaagtcacggtattggcacttcctgccgcgaggctccccagattaacgccggtaaccggattggcgccagcaatcacatttccattcagacgaaagctgcctgctacatatgagctaccacttggaatgttatccctcaatgtaacgttagcagcaacattccctccgttgttcacttgcagtgtataggttaccaggtcacccaccgtggcattggtggtactcgccgatttcacaatggacaggtttggcgaataaaccgtaagggtggagttgttggacggaataactccggtaatgaccggcccccctgctacactttgaaatgtaaaggctgcattggccgaattcaccagttgcaggatgcttgcatcctgaccgatgagtgctcgataggttacaacaacactgctggataaagttaacgaacccagcggaatgcctgccgtcacatcaagtgttggacgggatacacctgcaaccgtgacactacctggaataaaggtaagacctgcaggaagtgaatcggataaaacaacactggccgcactcgcagtgcctgcattggtgacggtgaccgaatatagaatactatccccggcaactgcaccggcggcgaccgttgccttagccaatgtgatttttggtgcattaatatcaacttgaattgcattggcgttgacaatgtaggcatcccccgaggtcgttaatgtcaacaccgcagatgactggttattgatcagtcttgctgaaacatccacattggtaatatcccagccttgacgtccaccgataatatttgtacctggagctccgttgatctgatttcgtgttccaaacgttcctgttgtattaagcgctccggtatctccgttaatctgagaggcaaaaaagttcgcagctagattattgggcccagacaaagcaaccgatgtagctgaggtaggcccgaataatgcctggtcaccggtccggttcgcgtcgccctcctgtgcactgaacagtattcttcctcccaatacaccggaaaggggcgttgcaaatccagtcagtgtggtaacaacaggtggtgaagtggattgaacgagtacgccccctgcacgcaaagacatgttgcgaaaaggcagattgggattctgataaatgactccaagtgtccaccccgcatgattggccgtggaatcatttgtaataacaatagtccctaccactgctccggtgatatatgtacctgctcccccattttgtacaagtgtggtcacattagcggaacgtacatagccagcagcaccgccccccagatcgaattgattgtaggtaagtggatcaggggtaacactggaagtccctgccggtgtaataaacgtaaccggattgttgatggcagcactcaggttgactgtaccattaatgtaacttccgccccagatcaattctgcatacagaacggtacttccagcaggtagtgtaagaatggctgctgaactgttgctctgatacaggcttgtcgttcccagtggataggtgccgtattggaggctggtgttggttgtgataaaacctccaatactatcctgtgttccgggtactcccgctgtttccgaacgactcagtccaagcgtatttcctgtaaatgtaattgctcccgtagcattaacggttgaacgaacgacaagaggaatgaagatcacctccccttcatcaatgatttcctacatatggaacggagccatgtatatagtctatgagtgtattgttgagttttgtttgtcctccataaaaagtttgtgacaactcgaaacttctgtgagtcttgttctctcataacagttaaatacatttgcgttttgttcattgtgatttataattatcatatacgagagtaattctgtcgtaccattatgatgcagtcagcggtgatatatgaaaggtttccatacgcacaatagtcacattccaacagagtacgagttcaaacattccaaatggattcaaaaaatgcttcatgcctactgggttgttacgattgcacatttcgccattcagattggctgtttcctgtttctggagtacgatcgcacacctacagatttcttgatgaatgtcctcttctggcctacggccgtcagtagttcatgcattttgttcgcaagctgggttgatcggcgcttcagttcatattccttttacaccatgtctatagccagcacggttatcgcgtggacgattattcatgtcaattatgacattcggattatattagcaatctgtctgttgcccatctttgcttcggtgctgttcttcagtaaaaaaagagtctggattgtctttctgatgcagatgactggttactttctggttttgttcgatccggcctaccggttgtacctgtcttcatttgacatggtatccattcctgcttttctaatcctaggtacatatgtagcacaggttatcgtaaccagcggcgttgaggtgctcgatgatcttcaggccagcatgcttgccaagcaggaccttattgtgcgaaatgccattatgaccaaacagtccaaaacagacggtttaaccaacctttataatcaaagttcattcaaggattattatgaaaaagcatttgagtatgccaacagtggcatgagtctgcatctggccctgatcgatattgatgacttcaagtccattaatgatacgtatggtcatcgggttggagacattattctggagaaagtgtccctgatcattcaggaaaccattacctcaagtgatattgcagcacggtacgggggcgaagagttcgccttattgatgtttgagcaatctttcaagcaggcttatgccttggtggaacagattcgtcagaagattgccctgatgggccatctggaacttgaaggagcttccatcacggtgagtatcggtctcaaaagctacagccctaatctaaccaaagacaaattgttcgaggaagtggatgcctgtctgtatgccgcgaaacgaacaggtaaaaataaaaccgtaacatcacttgatctgacttcatccttggcagagaaaatataactaaaaaagttgtgctgtacaccggaattccggtttgtacaacacaactttttttgggtctgaatatgatcagcaggccgatctttttcatacatctatgttctcattccgcccattcccagcgatgacgattttgctccagcatcggatgcaggtattcggacgatccgtcaatgatgagacgcagctctttgatccaatccttgaaggaatcaaatgaagcaaacatattcgccatctctatcgtcaaataaagaaagtgaggggctggatattccgcagtgatatggcgcagcgcgctatccacaggtgtatatttctttctcttgccctcaagcccctccacacgtatacgtgaagttggatgttcccgccgccaatcatgcaggcggtcttctcttttgtaatatgcctgtatcgaatccttgctcattcgtttaaacgtgctctcgtgtaaaggatacaacacaagctgtatgaatgaacgggtatctaccgttgcagcggcgcgctcgagttgctcatcagtcacatgttcaaacgagtcataaaaagtcagtgtgcctttgcggctggccgccggtggctcataaccataaggtacagatgtatattttccagacatttcacccctccttgtttatacgcacattcgcacaaaggtgattgggataacccagctcatgttattatacgctaacgatcttgcttcaactcggaataaaatgtcattctgttcttgcctgcacgtttggactcatacaaagcttcgtccgccatccgaataatctcacttgggttgtcgctgttggttggatattcggcacctccgatgctacatccaattcgaattcgctcgtattcgataataaacggcttgttcaagctttgaatgatggcttctgcataagccatggcttcttccctcggatgacttccaacagactgaagtacaatcaagaattcatctccgcccaatcggactgttatacccttcacctgaccaagagcagacagtcgctgcgccactttctgtaaaagcacatctccagtttgatgtccaagtgtatcgttgacccgtttgaatccatcgagatccagatagagaaaagtcagcgtgtgattttcactttcggtctccaaagactcctccagatacacttcaagggcagtgcgattcggcagtctagttaactgatcaaaatgcgccagattctgcatcacgaccagctctgagtttttattcataagagaggtcagcatatcccgaagcgaacgggacaacacttcaatctccttaatccccttaatcgcaggaatctcaagctcttcccctgcacgcagtcgattggctactctggtaagacgcacaagcggggcagagatcagacgtgagacaacccagccaatcagtgcaaacagtacggtaacggcgagtccagaccacacattaaaccacatcaggtcaaacacagacgcaaaagcagatgacttgacttgacgaatgactacggtccagcctaatccgggataatccagatgaccctggctgtaggcaaaccctgtcacatattcattaccatcaggccacttctcaatggaccaactgcttttgttgagctgggcctcttcgatgccaggcaataccaacggtttaccgacccattccttcggccccagcaacactgtatgttcctttttgctaacgataaaaaactcaatgtccttttcttccctttccaatggggcaagtacagattcctcgacctccttcgcccattcccagcttaaatgtgcagcgagcacaccttgaatcattcctttgctatccttcagcggaaaactgatatcgacaaattgcaacggctctcccgttggattcggaagtagcttggcaagaagtactgcattatgcacatctccaatgaatttacccttgattccctcctgatacacaggtcgctctgataaattttccccaagcaagataccatccgtagcagctaacacttttcccttcgggtccatgaatccaacccatgagaatgagggaaagctatcttgtaactgatccagcagcatctgaatctcatcaggttggaattcatcttccaacgaagccatttggcccagcaggtccagttcacccgcacgagcggacatgaatcgatccagcttgtccgaagcctgtgaggccgtgcctgtaagcgagtgaccaatctcagtctctacagcaacaaatgacttttggctaaaaatagacccaatcgtcagggtaaccagcaaggataacacagcaaagatgactgtaagcacagttctaattttgaatgacattacttcctccattacacggtgaaaccatcttgcttttcaacataactatgctgtaaagagtacacggaatgtcacctcggacgtgtctcaaaactcgctgaagtgcatcttttaccgccttttcgccccctgctgcgtcactttcccttgacgtgccccggcacgcctgcggaaaacttcctggcttggaacgaaaattcggcaaaatctgcttcttcggagtttcagacacgccctaatcgttttcatatttatcggaacttgtgtgtttttttattatacatgcccatacaatattatactgaaatcttcaccgtgtttcttccattcaaagaatagacacgattctgtatatacatacttgggttatgaatatagagagcaagcatatccttcaaaggatcatgcgcctgtatgtcacagaaagagtaatcgaaatactaaacattgggggtgtaatgttgagcctgcttcatgttgctgttattctgccttttgccgctggcatttttcttgccatgctgcatcgtttcttccgtaaattacatttgggatggccggttctccttgtcccggcactattatttgtatactttgcgagtctcatacccgctgtgtcacagcgcaataccgtatccggaaatatcccatggattccttcactggacattggatttaatctgtatctggacggtctgagcctcatgttgacactgctaatcaccggaatcggtgtcctcgttgttctctactccatcttctacatggatatgaaagaagcgctgaaccgtttctacctgtatctgttgatgttcatgggagccatgttgggcgtggtgctgtctgataatatgatcgtgctctacggattctgggaattgaccagtattacgtcattcctgttgattgcattccattacaaacgtaaagcctcgacttcaggagcacaaaaatcattcctgattacggtatttggcggtttcgccatgcttaccggattcatgatgatgtatctcattaccggaacattcagtattcgtgcaaccattacaggattgggtcagtttcaggaaagcgcactatttctacccgcacttatcttgatcctgattggagctttcaccaagtcagctcagttcccgttccatatctggttgccggatgccatggaagctccgacacctgtgagtgcctatcttcactcagccaccatggtcaaggccggactgtacgttgtagcacggtttacaccaatcttcggtggacagggactctggttctggctcgttaccggcgttggtcttctgactttgtgttatggatcattcctggcggtgaaaaaaaacgatctcaaagcgattcttgcctattcgaccatctctcaacttggtctgatcatgtccctcttaggggttggatctgctgctctctacttcggatatggcgaatcctctgcgatgtatactgttgcaataaccgctgcgctacttcacctgtttaatcatgcaaccttcaaggccgctctgttcatggtcgtagggattgttgatcatgaaacgggtacacgtgacatacggaagctcggtggacttgcttcattcatgccaatcacattcaccgtggcattgatcggctcacttgccatggcgggtattccgcccttcaacggattcctgagcaaggagttattcttccaggcgatggtggaagtcacgcatctacgaatctttggacttgggtcctggagtgttctattgccggtattcgcttggcttgcaagtgtgtttaccctgatctatgcgcttattatcgtgttcaaaacattcctcggtcgtagccaaagcgagatccctgccgagaagctgcacgaagcgcccgctggcatgctcattccgcctgttgttctaggtgttcttgtcgttgtattcggactcttcccgaatctgctggccggatcactgattgaaccggcaatggccgctgtgcttccatccctcttgaatgggaatgagcgcttcgatgtacatttctccctgtggcatggatggactccggaactgattatgacaatcggagttgtgattctcggaatcactctctacaagctgttgccacgatggaggaatatttatgagcattatccacaaggattaacaattaacaatatgtaccatgtcgtgcttgataatcttcagcattatgcacgcaaatggacggaagcctatatgaatggctcggttcgtaattatctcgtttacattttctcattcacggtcgcgttgctggtctatgccttcttccgttcaggagaaaatattacctggaatctgcaaggcaatgcaccttactcattctatgaggtggtactactagtcacgctcatcggtgctgcagtttcgattccttttgccaagaacagactatcggcagtcattatgactggagcagttggttaccttgtaactctgctattcgtactcttccgggcgccggatctggcgttgacacagatgattgttgagacggtatccgttgcattgttcctgctctgcttctaccatctgcctgagcttcaacgtggcaaatcaagccgcagttatctcacggtaaatatgatcgtagcgattgcagtcggaatcgtgatgacttttgttgcactagcggcaagcggaacagcatcactggacagcatttctaccttcttccttcaggaagcgtatgactcggctggtggtaaaaatgtcgtgaacgtgttgttagtagatttccgtggattcgatacgttattggagattatggtgcttggcgttgcttcgttatccatctactccatgattaatctgaacctcgaagcgaaagatctcggagcacgcttgaagtttcgtaagaaggacgagagtcaggattccgaacctgctctggatgatgaagcggacaatacgaaaaagtatggtaaccgggaacgcagctcatcctcgtgggatactgtccccttgcagagtaatgatgtattgctgcaaacgaccaccaaggttgttgtgttcatcatactgacgtttgccatgcacctcttctttgcaggtcaccacaatccgggcggaggtttcatcggcggcttggtcacagcggcagcgctcgtattgattgccctggcattcagtacagatacgatacgcaaagcgttaccggttgacttccgtattctaacaggaatcggattgggtatagccttactgacgggtgcgggttcatttatatttggagttccgttcctaagtcaaaccttcggctatttcgaacttcctttgctgggagagacagaactcgccacggccatgctgtttgatcttggcgtgtatctcgctgtcctgggtgtcaccatgaccatcattctacagatcggggaggatcgctgatatggaaatattgatgtgtgtagccgttggcattctgtttgcggttgccgtctttttaatcttgtcgcggagcctgctccgtatcgtacttggcatgtccatactaacccatggcgtgcatctgctcttgatcaccatgtcacgtctcaaaactggggcaccaccgctgcttggggagatggctgaacgttatgtcgatcctcttcctcaggctttgatactaacttcgattgttatcaattttggactcactgcgttcttctttgttctctcctatcgttcttatctgaagctgagaacagacgatatggaagaagtaagggggcgcccatatgaataatctcgtcgttctgcccattctcttgcctttgattacaggtgttctggctctgctatttttccgaaaaataaatatccagcggatcattagtgtcattggacttttgtttacagcagcggtctcaacgatactcattacgcgggtagctcagactggagttctaacgcttaatatgggtggatgggcacctccctatggtattgtgcttgttgcggacatggtatcggcgctacttgtcgtcgccgcttccatcattgcactggcgtgtctgctgtatgcgttccgcagtgtgaacaaggagcgggaagagcaccacttctatccgttctttcattttctaatcgcgggagttaacggttcattcctaaccggagatctgttcaatttgtttgtcagctttgaactgatgctcatctcttcctatgcactgatcgtattgggaggtacggaaagacagcttcgggaaacgatcaaatatgtcttgattaacatcgtttcttcagctctttttgtcgcttccatcggcttcctctattccataactggcacactgaacatggcagatttgtccgtcaaaattgctgaagtgggacagagcggagtcattaccttaattgctgttctctttctgatcgtatttagcatcaaggccggactgttcctgttcttctggttgtcgggctcttatgcggcaccacctgctgtcgtcactgcattgttcgcaggattgcttacaaaggttggcttgtacgcgattgtgcgaacattcacactgatcttctatcatgatcctgatttcttccatgcactaatcggatggatggctggagcaacgatggtcctgggtgtcatcggtgcgatctcataccgcgatgtaaacaagattctcatctacaacgtggtcgcaggtgtagggtttgtcgcttttggtatggctgcggccagtcgccctgcactggaaggtctgctcttctatatgttgcatgatatgttgatcaaaacattgctcttcctgctcggcggtgccttgatcgctgttgccggaacatccaaacttgataacatgggcgggctaatccatcgctatccgctgctaggctggatgttcttcattagcgcacttgccttggcaggtttgccgccatttagtggatttccagggaagttgcttctctttgaaggaggcttgcaggcaggcttgtatggtctcaccggcattgcggtgctttcaagcttgttgatgttatattcagtacttcgtatcttcatacaagcgttctggggcgaaccacctgccggggttacaagacgcccttacgcggtgaacggccttctgattcctgccggaattctgtttgtattcatcatcgtaatgggtgtgggggctgaaggcatgttccaattgacctcccgcgcaggcgatattctactgcatcccaatatttatattgatgccgtattgaaggagtagatgtctatggcctttcagattgtactgaatcttatcattgcttttgtatggatgtttctgaacaacgcctggaatggtgttggttttctcataggttacctgctcggactgcttctcatcggggggatgcgcagattcttcccccaacgcttctatgttgtgcgagtctgggccatcttcaaactgattactctgctgttcaaggaactggtgcgagccagcattgaggttatacgccagattatcaagcctaagctcgatataaggcccggtatttttacgtataaaactcaattgtcctcggattgggaagttactctgctctgcttactcatctcattgacaccaggttctctgccgcttgagatctcgggtaatcaacgcaaactgtttattcacgcactggatatcaaggatgaacagaaaatgagagatgatatccaaaatacattcgaaaaagcaattatggaggtgacgcgttaatgttatcctcactgttgttcatctcattgctcattctctccttggccattctgggttgcttgtacagggtgctgcggggaccatccatggctgatcggatcacggcactggataccatcggtatcaatgtgattgccatcgttgccgttctgtcgatgatgctgcaaactcaggcctatctggatattatcttgctgattggcatcttggcttttctaagtacagtggcatttgcacgttatattgaacggggggcggtattcaaaaatgatggagatcgttaaagtagccgctgaaaccgctataggtctactcgtactgctcggtgcactactcagtgcactcagtgcattcggacttattcgtctgcctgatgtatatctacgtgcccatgccgcaaccaaaagtatgacacttggagtgttctgtgtattaagcgctacatttttctacttctggtatttcgataactatatcagtgcccgcttgttgttaggtatcctgtttgtattcatcacggctccggtcgccggacatctgaacggacgggccgcctatcgcacagatgtaccgctgtgggagcagagcgtgcaagatgaactggaacccttgttaaaagggaaaaaagtgaaccatgaagccaaggatatgatggagtaatccccagtctaggcataacaaatacccccgaggatcagccgcccgtttcgcggcatgttcccgggggtatttgtttattttgcatacacggatcatatcaagcactgattatgcagactgattaagtagtaaagtcagaatccattcagtccctgtcttctcaggtccgcagccacaatacgtgcaagctccgcagccccttgacgattcggatgcagactatcccctgtcatatacagagcaagtgttgctgctggaccaatggacgtgaaataagcagaacttaacttattcagttcaaccagggtgactccctcttcctgagcgagtgcacgggttgattgattgtaccagcggttctccgcttgatgcacattggctgtattaaaatctgttgcccggccctgaggcgtggagaggataaccgttgctcctttgttcttcgccttacgtaccatatcccgcataatctctttgaactgcgcctccgttgtattgttcttggcattggtatcgttaattccgaattgcaaaataaaataatctcccggcttgatatacttcagaatcgcttccatctgaccatcatcgcggaaacctctcgcaaattgaccacttgccgccatatttcgaacctggaaggtggcattgttcacataggacggaaacaactgtccccaacctccttgtacactgctacctagcggatagtaattgcaaactgttgagtcaccaccaatgtagatcgtgcggttggtaacggtttgattggataacttccggatttcaagtgcactaagtgtgaaggcggtgcctgtctttccttctgtaaccagcaggtttaattgcccgtcagtcaccggaatttgaaactggtccgttgccccgttgcccgtcatattaatgatctggtagacaccttctgcagccacactcgctctggcagtattgcccaggaccactttaacttcatataggccattggacagattcacattgaaggtattggtgctcttggtgccgtaagtcagaaactgcacagcgtcactcttaaccccgcttcctgaggcagacacattcctcatctgtgcaggtgtgttgaagccataaccttttgtaggcgtataagcatctcctgcggacacgcctgtgtaaccgctctcaacaccacccgaaccaaagtcaaatctgtaattgtccgttgccgcttcggcgacttgccctccactgcttcccaaaccgatgcccattgtactcgcaaacagaacaaaacagagcagaagctttaccgatattgaccatttcatcactgaattctcctctcgaatcagaattatattagttgacgatcctcagtttcacagaacttggtcaagccagtcataagccttcgctccgctaatctcatgtccaccggtaaagaaatccgcatccagtgattctgctgctcccgcctgctcatatatatgtgtcaaacgggcatacgcctctctcgctgcatggattgggaacacctgatcatcacttccggcttcaataaaaagtggcctaggcacaatcaggccgatgagatccggcaattccgcttcacgcaggatacctggcacatagttgtccagacaatggttccgatccaatatgctgccctggaatgtatttgcataaccgcttaccacagttgccctgaaccgttcatccaacgcggctgtaaatgcggtcaccagcccaccgcccgagatacccatgcttccaattcgctccaaatccacttctggccgagtcgatacataatccaatacacgtgttgtttcatacaccctatgaccggcgagggtcttccccaccatgagcagatgcgtagcaatcttcgtacaggagcttacccctggtggcgcatcgcggtcctcttccagtcttcgatcaccaaatccgagcaactctggagccgcaaccacataaccacgcttcacaagagctactgcaaagtccttgtgtaatccgggctctcctgtccgtagtgacccatccggttccatgcccgatatctctcggctaccatagccatgcccatgacaagcaacgatagcaggtctctttgtatcagtaacgcttccatcaccaggaattaataaatatacaggcatgcgaagtcctgcataggtcgtgatttcaatccgctcccgaatatatccgtcacaggtaatgcgctccagtaagacaggattcagtgcggccgccatcgtgggaaaaccgcccagccgttctttcacacgtgtacgtaactgactgcgccataaatccagggggtgatctgcattatacgcggaacgaccacgaagattcgtttgttgttgtagataggcttcaatatcagacatgggcctgtgtccctcctgtttttcgtaggataacgtagatataagactgttatatggaattaatcccatccattatagaacatctaggtcacccatgaattgaacatgtttgcctgttttgaatggaatcacatgatttctagccaaaaaaaggatatctccaacctgaagacaggttacggaaatacccttcatttcatctgacctggcaaccaccagttccacctgcccattaatttcatcaatgcaggtaccagtattagacggattaatgtaacgtcaatcaacaccgctgccgtgattccgatccctaactgcctcacacctgcgacttcagcaaaagcaaacggcacagtcactgcaagtagaattgccgctgcggaggtgaccagacggcctgtagaagccaatccctgttggacagccacatcgctgtctccggttcgtctatacacttcctggatacggctcagcataaacacaccataatccatggatatgccaaacaccaatcctgcaatgaataccggaatcataatggcaatggctgacggctccatgcccagatgtccttcattgaacacccacaccaatatgccaaatgaagcggctaagctgagcagattcatcagaattgccttgattggaatgagcatcgatcggaatgccgccagtaacacaagataattggtgaccactacaaataccagcactttgggcagttgacttgtgacttcctgcattatttcatactgcttggcagcttccccaccataacgtagttttacgttgttgaaaccccgtgtatgatcgctattccttattcgttcaagccaacctgcaacctgttccgaaccaggctccccgtgcacggtggctatcaatcgtatggaatggtcagagacggttgaacgcagccatgtcgtccttgttgactccttgccttctatggaaggagttagcgccgacggtggaatttgaaaaaggctctgcgagtccgtttgattcggctgtaataggccccatggtgaaacaatgctcaatacgtctgagtcctgcagtagttgacgggctttgttgtgggccatctgccagtgagaggaagtcaaccgttcctgctgtccgccaatcacaatctcgatggcggaggtattcttttgccccaaatcatgttgcaactgctctgctgcctggcgggagtccattctctctggcagtgaagaggcatccgggacggacagttccagccgggttactggataaacacacaggagaagcacaaccgtacctccaatggccatacggacgggtcgtttcatgaccattgctgaccatcgatgccagaccgagcgtctgggtaaccaatggactaactttcgcctgaatacccgatccgcagacagtgacagcagagctggcagcagcgtaacatttaacagtagcgacaggagcagaacaataatggcccccaaggagacactcagaaacatcggcagtctgatccagagcagacccagcagcccaaggagcacgcaagctgtcgagaacaacaccgctctgcctgctgtacgtaatgttcgctgaagaatctcgctccgaagaacctcgctctgcatatccagactgctgcctgtaaagttaacttcgccttcatcttcataggcccgctgaacttcttccctgtacctgctcaggatgatcagggcaaagtctatactcagtgccatgcccaccatgggaatcacattaatgataaagttggacaattccagatgataaccaaggagtgacgtgactcccatcgcggtaatcacagcactgatccccatcatgacagcaatcaacgcggcatatagccccctgaatgcaaaacacaaaacgatcagggcaatcggcaggcccaccatctctgcccgttccagatcacgaaagctcagatgattgacatcctgctgcacgactgcctttcccgtcaattgcaccgtacctggaccgtctgttgccaacacggcgcgcagctgctccagtgggggacccatctgatgcgcgggcacatccattttcacaagggcatatgccctttggtcttgcagcgtcaccctttcgctaacatccagaggggacgtgatagaggttaccgcaggcaacacttgaacctgtgtcaaacgatccttgatccactgccggaactgtaacggcgaggtattttcctttttctcaaacaccagaataaccggatcagcgggagatccgaattcatcctccagaacaagttcaaccgcttgcgcatccccgtgaacccgttttaatccgtgatcttgaacaatgtcaggtaacttccatgcccagaccgctgacatcccgatgataaatacccagcagagaataatgaaccgcggatatcggctgatgaaggcagcaagtctgcgataacccatacctaagctcctctgcgatcagattagtcattcgattatgttcatcggtaagatcgtaagcacattcatacacttacggtgtatatctccttcactcgggttcgcgaactattgaatgccatgattcacaggtgttctgttcgcaatgggggcagggatgtatgtaaaaggaagtaactctgccgtcagtcccgggccaaaggccagcgctatcccactggaatgctcttccttctgtctgtaatcctcacggatggcttgaagaacaaaaagaatcgtcacggacgacaggttgccataatcccgcaggatgtttcggctgtaggagacctgctcatctgtcaactgatacagcttctgaacggcatccacgatgcctctgcctcccggatggatcgcccatatttccggtaaaccgctcccctccagcaaccgttctacctctggaccgagatgcaaaccaagcagcttcggaatctgtggtgacaggtagagatcaaagcctgtattgccgacttcccagatcatttcttctgcacaatccgggagcagcgttgagtgccctcggcctagtcgaaaacattcattgcggtctgttccggacgcaccaataacacaggcagaggcgccgtctccgaagaacgatgcagcatacaggtcgtcccgtttggcagatggctgaaagtgaagtgtacatagttccacacacacgatgagaactgtagccttctgatctgccgttacaatggaattcgccagttgaatcgccttcagaccggctgcacatccctgaaacaccagtggaatccggttgatctgcggtgacagttcaagctgttggatcagccgaacatcaagtccgggcaggaattgccccgtgcaactcaccgtaatgagatgtgtaagttccgaggaggttacgtctgcatcctgaagggcctgtccggccgcctcgagaccaagtggaacagcagcggctttgtatttgcccatacgctcggatgtagtcggaacctcgtccgcattggtaaagggtaaatatcggcaagaatcaacaggctcaagcagattcggttcacacgtataccgagtctccacaccgcactgattaaagatccgtttggcccatcttctcgcatctggctcatgttccagcgcttgcgcgagacgggcagatacatccttttgctcaatacggtgggcaggccacgccgttcctattcccataatacttgccccagtagttgcctcaagctggttcatcggcttaacccccttatagtacctgttcaaaagtaggctttttaaacaacctatatataaaataggttcatatgacatgtgtgcaggatatagtacaagtctattcactacctgtcctgtttatgttcatattaacaagcaaaggcggacaacatatgcgagtttcgcacgtgctgtccgcctttgctaccggattaaacccgttcctatattacatattcgatctgtcagaactactcaggccgaattatcgtgaatctctccccaagcttggcataatcattacccgccagtcggctgactggtttcaaatgatccatcaggatatagcccttgtccggattgtagacttgttcgctgaaatgatactgtacaatacgtaccagcagcaggtcactcaccggtttgccctcatcattcgtgatgggaatgtgctgatacagctcacactccatccgaatgagtgcttcctgaattcctggcacagcaaccttggtacttggcactgtagtcagttttgtccgctcaagctcactttcgtggggttccagtatggctgctgtctcattcacttctgttatgattgcttcatcacagatatgcacgaccagttcttgatgagcaagcacattacgtgcagtatctttcatgataccgtctttacgtgcaatggatatggataacagcggtgggtccgaactaaccacattaaagaaactaaaaggcgctgcattaattacaccattcttatctgaaagtgtcgtcacaaaagcaattggacgtggtaccaccgaaccactcatcagtttatagttgtctcttcccgttatttcacgtggatccaatgtatacatatgtaaatatccccttccatgctcgtgtaacaagtgtcaatttcacttcaggacacgataacacactcatatttattatatatcgtaaaatgctaaattaacaaaaaaaactccctggtgccctgcaccaaggagtttgaacatgccatttcgtattggctatttcttatttaacgatgctgttctgaatgtcttccataatttgaaggttcgcttgaactccgctgtacaaccagctactggaccgggtgaattcaaagacattacctgtctttacagcaggaatgctctgccatacggcatctttcagcgcttctgagcctgctcccttgtcactgttcaccaggaatagatagtctgtgtccatttccgcgatcttctccaatgaaatctcagaccagttacccgttgccttcgcagatgcttccttcacaacattaggctctgcaagtccaagttcgttgtacatcacttcaccactggaaacattgttgcttacaacataaaacttgttattgaacaaccacaacgctgcggccgactttgttcctccagtaacagcagttactttttctttgatttcctttgccttggcatcataatcgtcaagcgccttctgcgctacatccaatttgttcagaagctcgccgatcttgagcagagcctgacgcgagtccttgttgacctcatctccgagtacataagtaggggcaattttgttgtactgttcgtatttctccccttccactgtactttcagaacccataataatcaggtctggtgagaaactggccatggcttcaaaaggtagatcacttgcaataccaggtatgccattcagatcattttgcagataatcctgcaaaccattgccgttgttgatggaccactgtgccgctggcttaacaccgagtgtaacgagatggtcttccagataagacgcgatgacacgttcagggttagccgggatggttacttcgtgtcccattgcatctgttaatgtgcgctctgtagcgacttctgtttgtgtctcagtctccgttgttgtatcgttctctcctgctgctccattctctgcaggcttcgctccacacgcggccaaccagatggacataaccatcaccgtaattagaatcatgatcatctttttatttctcttaaacacttgatatatcccctttcaattcattatgaaaaccttattcggcgctattgtgacagatatcaacgttcaaaaatattgacactattattgatacatataatatccgtatgtacatttgtccgattccattgacaatgataattgttatcagttcagttgtcaattcgattttgctctgcgctataaagttgaactacagattgtttacactgacactacgatgataaaacaaccttccaatcgctgttatccccagattttttcgattcccttttctctaagggaaaatccggtgatagcgtatgcttccgatgcagctttctttcagaaagcttttaagcgaccgcttcgctttttcagtttttttttatcttctccgtttggtgtaaatgattagttcaactatatagatcatataaaatcttcttggcgcactcacatataggcggatgccgccatatgctgaatgcagaatacgacgacaggaaggatgttctgtacatgtattacgaatataacccttatctaagttatggagaagaccgttcctttcaattgcctccactgttcccaggcggtggcggcacaccgggtggtccgacgtttcctggtatacctggcggtcaaggcccctatcctccatacattccaggcggaggacccggtccatatatccccggaggcattccaggtacaatcccgggtacagcaccgggcgtacctgcgcaattgactcaaggcaatctgcccagcctgcttagtgcctatcctcgtccggtaggtcagcctccggcagaaatgctttttctgtataacctgatcaaaagcagcccgggtctgctcccgctcttcctccagcaacagccgcaaagtctcactcaagctgtgcaatttgcacagactggtgcagcggcaccacgagataacgaagaacgtgcgctgcccaacttttgctacaaccgatggtcccttgtcttcacatataatgatgtctacctgatgtggcctgcgattaatctgtttggttttgtggtggggtacttctatccattcctcacgccaggtatactgtccaatacacagattttgtttgcgctctgctaaacctgtccttacctacagcaagagccccacttggaagcataattccttccaagtgaggctctttttcgtccttttatccagatgcacctttacattactaaggctccataaacgcaaggtgtacagaatcagtacatttaactcaacacttgatcgttctggcgcttcctgcctttactgaccattaggaagtaaatcaccaaggcaccgagatccgcacacgcaataacgattcccattggcacagctgtgccttctcccccgagacctacgaggggagcgacaatacctccgaacaggaacgtcatcacaccaataagcgcagaagcactgcctgccgacttctcctgatcggccatcgccaaggcgaaggacgcggtattgaccaacccaacactggataccaccagaaataacggaatcagtacagagattagattacctccagccagaatggcgatgagcagagatgttcctccgagcgccgcggttagtagacccgcgattaacaggcgagtctctgatacctttcctgcaagtctgccggcaatctgactggccagaataatgcctaacccgttaatggcgaagcatacactgaacatttgcggggataccccgtatattttctgaagcacaaacggcgaaccggatatgtacgcaaacatgccagccgctacgaaaccctgagttaacgcataacccataaactgacgatcccctgcgatttggcgaaacgtaattaatgtctgcttcaatcctccgcttgatctgcggttggaaggcaaggtctctccaagaccgaaaatgacagccaacagcgtcagtattccgatgaggctaagcaaaataaatacgccgcgccacgacgtatacgtcaacaattgtccaccaatgattggtgcagcaatcggggctacgccgttaatcagcattaacagagagaagaaccgtgtcagttccgggcccgaatatacgtctctgacgattgcgcgtgagatgacaatccctgctgctccagctacaccttgaatgaaccgcagcacaacaaaagagcccatcgtcgggctgactaggcaaagtatggaggcgatagtatagagcacaagccctgcaatgagcggtgttcgccgaccacgcacatcacttagaggtccagcaagcaactgtccaaccgcaagtccaatcatacacgccgtcagactgagttgagcatacgatgtagatgaaccaaactcatcagccagcgtgggcaatgcgggtaaatacatatccagggacaacggcccgaaggccgacaatgtccccagaattaaagccatccgtacacgagatgtggagtttgtgttcaatgaagctgttgtacttttcatcaaatactactccccgctacccagcagcttgagcaggttggacggcagtgtgaactgctgattgttaataataatacggcgcagttcttcttcatcccgctcattatcggcgtccttaatctcctgaatttcccggtgaagtcgctccatctgttgatccagcgcatttgccgaatctgccgcactctttaactctctcgtcaaatgctcgggaacatccttattgtatttataaaaaatcttatgctccagactcgcccagaaatccatcgcgattgtacggatctggatctccacacatgctcgttcctcaccattggacatgtacacaggcacttccaccagaaggtgaaggctttggtagccgtttggctttggattctcgatgtagtctttgacctccagtacacgcagatcactctggttgcacagcatatccttaatgcgatagatatccgagataaaggaacatgtaatccgtaccccggcgatatccttgatattttgcttgatgctctcaaacgttaactcatgatttttgcggaacatcttgttcataatgctctcaggagatttcagtctggactttgtatgctcaattggactgtaatcatgcaaagactggaattcttccttcaggacttcaatcttggtctccatttgatccagagcaaatttatagatcatcataaatctggtaatttcatatttgaatttcttgaattgatcgattggatgtggagcgttcatcatggctttctccctttctttctgcacactaaaattagttttatgaatatgagaacaagcggtcaatccacatgtctcctgaaccattataaatcatatggagccaataaacgaatttctcacatttgggctggcgattcagcctggaaggtatgggaacttattttacgcgcatcctatagaagcatccctttcatttggcccgcaattattaataaaagaggtggattttactgctctatcaagtgacatattcatccgatacacttcgggttaaagcttatttatacctgccacaaggttgttcattacctgatatcacgacatatgaaacttctcattccggctctgtctcctctgcctttccggaattcgcttcaatacatacatctctacatttgcaaccactcgccagccactacccttctgccagaatgcatgatatcgctcacacacaggaacagtggcctgtgctgatctattgtcgcggcggacttggcagctatggcggggtaaataccgtttggcttgagcaatttgtacataaaggttatatcgtgttcgccccatcctatcgtggcaacgaaggcggtgaaggtcgtgacgagtatggcgggaaagatgccgaagatgtgcatgccgcttaccggttgatacagcgtttaccctttgttgacccaactcgcatatcgttaatggggttctcccgtggagccattaatgctgtacataccgcaactgcctataatgagggaccggacaaagtacataagttagttctttggagcggtgtctccgatgtggaacgcacttaccatgagcgaaccgacctgaggcgcacattgaaacgggtgctaggtggttccccacgcacggttccagaagcttatctcgcccgttctcccttgtcgaaagcgaacaaactatcttgtcccgtgctaatcatgcatggtacatcagatacacaagtgaattatagtcacggaacccgaatgtatcactggcttaagcggcgaggtgcagacgtcacatttcacgcttatggcgggcaggatcatcattttcacgagaaaatacatcagtcagcggtgaacaatatgtttgattggctcgctgcaccttaagtcttgcgcgaatgaatttcattttgaagatgcatgggttatggctgtatactggaggggctacgtttttttgaaaggacggatatgatgaatcaaagcaccctccaaaaatacgccatgttgcttctctgcatgtctgccggaatggtggacctgatcggatatctgggactagggcatgtgctcacagctaatatgacgggaaatattgtactactcggtattgctattgcccgtgcgcaggaatttgtcgtgctgcggtcactgcttgctctcattggttttatagccggcaatgccattgcagcacatatggttggacatgtgcagaccaaaaatggctggtcctctaaggtcacagccgtatttactgttgaaagcatattgctcctgctgttcgcgatcgccatgattagtccattttcagaacaactgtcctatctgttaattgtcatcctagccgttgcaatggggatgcaaacaactgcggcacgccgcattggcattgctggcatctcaacaaccgtgctcaccaataatttggccgctgtggtcgaggataccgtaaacatcctcaaaaagctgcgacatgccaatatccgatcgttaaccaaagccttgtccacagactcctaccttcgtgcaggtgctgttgtcatctatttgatcggcgtcattgcagccgcattgttattccaccgtgtgcccatgattgcagtctggattcctgtcctgatcattggcggcgtaaccctatacgcccgattacatgcatggggaacttcacaacaaagcgaaagttaataatagaagaagtaccctgtccatgttcaagtggctgttcaaaagtccactttaggatactgaaaaatggtctttgtgaacatggactttaagttattttaagtacaatcacgctatttatttcatcaaagcagcttcttggcggataagcttgaccagatgctgtgcagcaggtgataatacctccccggctcgtgtacatacggcaaccgtatttctcagctgtacacctcgaacaaacacacgtgccagcctgccttgctgcacatcttcgttcacaaccaaagaagatataaagttggccccataacctgccttcaccgcactaatcgtttcgttcagcccgttgaactgaagcgcaatgcggggagcggccaggttatttgttgtgcaaagggaaacgagtcgctcacgtgtagcactgccttcttcgcgcatgatgaacggttctgccatcatctcatgcagctcgatttcttttcccgcatacggatggtcagggtgcacaacaaaccacatctcatcgtcaaacaattcatcccattggacacctgcatgtgtgatgccacttccaccatacactgcaatctctgcctcataacgaagtaattggtcaaaagccatccgggtgttggttgtgctaacaacaatctccacatcctcgtgcatttgcttaaaccgcgcaatccagcccggcaacagaaaatttgaaggcaagtaggttgccgtaagacggatcagtcctttcttgccctcccgaaaatcctgcacaaaattctcgacatcctgctccagcatgaacagacgttccgcataacctgtcaactgtatccccgcatccgtaagcaccagtcttcttccctccgaaacaaaaagctggattcccaattcacgttcaaacttcttcacctgagaagataccgcaggttgactaatatttagttcctctgcggcacgagtgaccccgccatatctcacgatggcatgaaataatcgtaatccatgcagattcatgtttacacctcttccacgtcaaatacataacctgaagttatattatcatacataatatatattttatttatatatccactccgtttatagttgaaatatgaaatccaatacaaggaacaaggaaaggaacatgtgaagatgaaaaatataaatacaaccgaactacagcatacctggactcaagttgacgactacatgaacgatctgctgattccatcagattccctgcttgaacatacactgcaaagcaatgccgaagctggacttcctgctcatgacgtaacaccaaatcaaggaaagttacttcagctcatgctgcaaatccaaggcgcatcccgtgtacttgaaatcggcactttgggtggatacagtaccatctggatggcaagagcgctgcctgaacacggacgcatcgtctcactggaatccgaatcacaccatgcagacttggcccgggccaatctcacacgagcaggactgatgcacaaggttgacctgagagttggtcctgccctaaccacccttcccgatgttcaggaagaatacagggaaccgtttgatatgatcttcatcgatgctgacaaaccgagtaatcccgattatctgagatgggccctgcgactgactcggccggggagtcttattattggtgataatatcgtcagggacggtgaagtgatccgcacagacagcacagaccccagagttcagggcgttcgatcattcctgcagttgattgcggatcaccctcgacttgaagctacagcactgcaaacggttggtagcaaaggttacgatggattcgtcattgctcgtgtgattgatgcccctgaaccaaaataaacagtggtcaattcttccgcaaattcccctttcctgttaaactggaatcactgcacaggcagactggggggaaccacttgagagttttacaacatattaatgatgaaattcgcggctggtcccgcaatattcaactgtttttcctggctagcattctgtatcagatcggaaatggtatgttctctgtcttgtataatctgtacattcagggtctgggctataatgatacaatgaacggccagattgtaagtattcaatcactcgcaacagccattatgtttgttcctatcggtctatgcggtgatctgttcagccgcaagcgattactcattaccggggcgttattcagcggaatctttctaatcggacgctccttcgattattcggctacaggactgatctggttcgcggtattctctggccttttcgctggggtgttccaagtactggccattccttatctggcggaaaacgtcaagaaaagccagcggctgaagatgttcagttattattcatcccttgtgctcgcttcccaggtgcttggtagcctgggtggcggtgtattcgcagatttgttacatacggcaggactcgccaaagtgaccggattgcagacggttttatttgtcggtggtgcagcaacactggctgcatttattccactgttatttgtaaccgaaggcaaggctgctccgcagacaacaattccggcgcaacccgttcttcaacccaatgcggagctaaaagaaagttcaacaaataccccaagcacggacgattcgatcacgaagaaaaaagattcccgactgattggtcagtttatagtgactcagttgttaattggattaggttccggactggttgtaccgtatctgaatctgtatttcaccaatcgattctcggtttctctgagcggcatgagcttactaattgcacttggtcagattatgacgattgtatccatgctgattggtcctaccttggcggcaaaggtcggaagcgtaagagccgttgtcattttccaggtcatgtcgctacccttccttctattaacaggcttcaccaatctgttgttcatcgcttcgctcagtttcttattcagacaagcattgatgaacgcagccaatcccattcattcagcgatactggtggatcggatctcggacaaacgccgcggcattgccaattcactgatgcagacctcgttcatgattggatgggcgaccatgggacccgttcaatcctatctcgtcaccacgtacggaacgtattggggttacgcgatcactttcagcatcacaggctgtctatacgttatttcatcactgatgtactatgtaatgttcagagaacccaaaccttccgctacggctctcgcaggatcttaatgaattgaacagtagcagtccggttgttccgcagataacgcaacgtatctcatcatcaggagtgatcacacatgaacatgaatccttcattaaacctgaatgcatacctgaatctcataccacctcattcaaccggtaggctaaacggatggaactgatgcgcaagcttggttcccacgttgtctttcggttttttcttagtctgggtgtctctgttcttggcggattgctgttcacagccattcatacaccaatcccgtggttgctcgggccaatggtatttatgctgcttggctcccaagtcgccaaatggcccctcatgtggcctgcctccattcgggactatggcattctgattgttggttattcgattggactcaccttaactaaagaggcactgcacggcattttgcaacaacttcctatgatgcttctgatgaccctgcttttaatcggattgtgtgtaattacggcctacatcgcttcaaagatgactgattttgactttccctctctgctggttggcagcattccaggaggactatcccagatggtgtccctcgcagaagagatgaaatccatcaacttgacgctggttacgtttttgcaggtgactcggctgatcatgattgtcttctgtgttccgttcctgctgttcagtccgtggattggaggtaccgcaggtggaggtttggatcatccgttcattgacgtagctacgtggggttcccttttccccgagattcttgtctatgctccgctctgtgtagcgggtgcatgggttgcacgcaaactccgatttccgacggcctttatgctgggtcccatgattgtcatgtgtgtcgttcaattaagtacaacgatgcacacgcccagtctgccaacctctctcttaaacgtatcgcaattgatgattggcagccacgttggactgatgctcaagccggaacagttgcaacgtaagacacagacggtgaccctagccgtgattagcagtgtacttctcattgctggtgcgcttggattgagttatctgttaatgaatgtattctccctctcggcggctacctcactactcagcatggcccctggcgggatggatcagatgagtatcatggcacatgaagtgaatgccgatctttcggttgtatccgggtatcaattgttccgcatcctgtttatctttttcatcgtctcttccgtactgaagatgattcttgtacatatgttaaaagaaaagaaagcagagccctcacttcaatgatcatatttcgccccgattccatgacaaagagagtatccatttgatgccacatcctgcggatactctcttttatttgtacagactcatcttcagcatttggcctcattcaattttaagcataatgactacttatgaataaattcggttgtacatccagcctacaatgcccaccgtaaccactgttgccccaataataaatgcataatagccaatcttacttttggactccgaagtctgatggtcataataatccgagttacgtcggtaaaaccccatccataactctccgatcatattcactacaaccaatacaaaacgtttaacaagccccattgtattcgcgtcccctctctctgatcaaccttcttccctattaagtataattatcccaattcattaaaacaacctacttatattactttcggtgcagtttcttgctccaaccaggttagaatatcaaatgcttcctgatcggtgttaccacacatctcttcctcagcttgcaatccactgcataccgcaggacgatctttttggccaaaaattccgcagcgattatcatcggtaagctgcacacaacgtacacctgccggcttgccatgagccatgcccggtatgggtgacgatatggagatcgcgatacaacatgcggcacagcctgtcctgcattccatacatattccctcctaatttcaatacacttacaatacatgttcaaaaagaccggttttcagtaccaagaagatgggatgaattccatattcgatgctgatgatgccattaggcatccttcgtaatcaaaagcggactttttgaactacctcttaattatgagcgatttatccaggtccaggttcgagcaagcccctgagcaattctccgattcatgcttcgattggaaaaataccccccatgacttagcggattccaactcatagccacgccgccagagttcacttcaatatcttctttcaccgctttctcataagcgggatcaatggggcgtaacggataacccagaatatcatcccgatcgtagaagttcacccattccccttccagcccggcataatactgattcacatgggaagagggcacctgaattgggcaactgaagtcatggtaacgcaaactccataagggcagggttgtaccaaacgagtaaaaatgggtcagcgtgtctccccgctccagagccgagttcacatccacaacctcaggaacacgactggacggatattgcagatcgtagaagaagttactggcgattacggcacccaaactatgggcaaccacacagagcggagcttccggtccattgcgctgtgcaagggcatgcatcgcctgattcaacgttcgatgtacggcatcgtagttatggccttgattttccaccggttgataagcaaccgcatcagccaggtaatggatgacaaatcggcgcaacgcctgaaagttcaatcccggagagctgacgagctgttgaaagagcgcctcttcccgctcctcaaatacatccgcccaatatacaggttcgatatccagcatctgtttagaggctccaggcaagaccatcaccttgtccaattccttatgcaaacaagcaatcagcttgtccgcgtacccatccttccgcatacccagcccatgaatgaccatcaccgcaatacgtgtcatggctctcctcctcatcgatctaggaactctttctccaccatatgaacgccacgactcgaacatgcctgaagcttgctttgtcagaagaacctttccacccacaattattttaaaaatgtgattcttccattttatatacagtttaccatgatcgtcatgaaaataacgatcatacagcaaaaaggagctgcacatcacgcagccccttcttgttgttgtattcaattaacctttcagatgaaccttcaacacaccattttgattagatgtaacatcacctgtcgtgacttccacccgttcaaccatatcctgaccatctggaatgataatcggtgtaatcagtgggtatcccgcatcttcaattaacttacgatcaaactccaacagcttttgtccagcttttacatgttcgccagcttccacatgcatgttgaagccttcacccttgagggataccgtattaatcccgacatggatcagaacttgtaatccactcgcgtgttcaagaatcaccgcatgtttacttttgatcacatgagccacctgagcatcaaacggagccacaacaacgttgccggaaggttcaatcgctacaccttcacccatctgtttctcggcaaaagccggatcaggtacttgctccagtgacacggcctggcctgttaaaggcgccatgatttccagtgtattcacggcttcgtctcctacttgagctgcactacgtgtgcgctggtttggatctgtttttgcagttgaagaggtaacacccgaagcagactgcaatgtagccgctttaggctcattaacggtttcattgcttgcactacgatcttcttttctcagtttggctctgccaaaaaggacggtcagtacaaatggtacaaccaggacaatcgccatgccgatgaagaagacaccccatttgtcagggaaaatcgacaggaatcccggtacaccacctacaccgatggaggttgcctgaacattattcatcgtcagcagcacaccaccaatcgcggaaccgatcataccaaagataaacggataacggtaacggatgttaacaccaaagatcgccggctcagttaccccgaggaaggccgataccgaagacgttgccgcaagtcctctcattttcttctcacgcaggacaagcatcatcgcaagtgccgccgaaccttgtgcgatgttggacaatgccagcatcggccacaggaacgtaccaccctgactaccaatcagctgaacatcgaccgcgaggaacgtgtgatgcataccggtgataacaagcaaagcgtacagaccaccgtagatcagaccacccagcgccgcgtatgaatcgtatacatagatcaagccggatgtaattgcatttgcaatagcaaatgtaaccggtccaataatcgtaaatgccaggaatccggtaatcagcaacgtaactggtgcgacgaccagcagtttaatcgaatcatgtacccttttgttcaggaaaatctccatcttcgcaagcagataggccgataccagtactggcaaaacctgcccttgataaccgatcttctcaatctcccaaccgaacagattccatgttggcaccgtgccattattcacagcatcagcgtaaccatatgcactcagcagatcgggatgtaccagaatgagaccaagcacgatcccgagcagcggactgccgccgaacctttttacagctgcccaaccaattagagccggcaggaacgtaaaggctgtacttgcaatcgtattaataatggacgcaagatccttccaggctggataaacatccaccagtgattttccatcaaagaaaatgcctggacctgtcagaatattgttaattccgagcaaaagacctgccgtaatgattgcaggcaagatcggaatgaaaatatccgagagtgttttgatcgctcgctggattggattttgctttttaccagcaaccgccttcacatcatctttggaagaacgatctcccccagtaatctgaatcatctcatcatagactttatccaccagaccaggcccaataacgacctggaattgtccttgggaagagaactgtcctttaaccagatcattctgatccagactttcagtatccactttactctcatcgtacaaggcaaaccggagtcgtgtaacacagtgtgttgcagcttcaatattctctttgccaccgactgcccggacgatctcctcaacctgttttttatctattgccatagtgtcacttcctatttataaaatgtgattagtcctgttgtggcacaagccacatataggatgcatacggactgagagagatttcctgcgtcagcgcaggggctgcctccgtatttcctatgagtaactctgctgatttgcctgcaatgtgatcattccagaccgcttccggaagcgagaacgtgacgtctcgtttactgaagttggatacaacaatcaaggtttcacttccattggtccgtgcgtacgcgaatacatccggatgtgcatcgtccaatcgttcatacagaccgtcgatcagcacgttaacctgtttacgtagggcaatcaatttgcggtagtggtagtagatcgaatctggatcagccagctgctgttccacgtgaatggaaggataccgctcatccaccttcagccaaggtgttccagtagtaaatccggcgttcttacttccattccactgcatcggtgtgcgggagttgtcccgggaacgctcttttacagtgttgaaagcttcttcagcggatttgcctcgttcttcctgaagcaggcggtacatattcgttgattcgatatcgcggaactcgctaacgtcattccagaccggattcggcatgccgatctcttctccctggtagacataaggtgtaccttgcatgccgtgtatcgttgttgcaagcatcttcgcactctcggcacgatagtcaccatcatcggcgaatctggacagtgcccgaggctgatcatggttattaaggaacagcgcgttccagccaccaccagcttgcatgcctgtctgccactcactaaagagctgcttcatcgcttcgaaatcatacggcatcagttcccacttctgaccattcggataatccactttcaggtgatggaagttaaacgtcatcgaaaactcccgggaagccgggttcgaatattggatacaatgttccagtgttgtggaggacatttcccctacggtcaccatgttgtaaggcccgaatacttcatcgtacatctcggtgatgtactcatgcacacgcggtccatccgtgtaatatttgcgtccatcacccggtgacacgctaccatcatcatcagggaaccgctggtctttggagatcaggttgatcacgtccatacggaaaccatccacacctttttcggcccagaacttgatcatatcccgtacagctttgcgtacttcttcattctcccaattcagatctgcctgcgttttatcaaataaagtcaggaaatattgtcccgtctgttcatcgaactgccaagcaggtccaccgaacttggattgccagttgttcggtacaccgccgtccggcgcaggatctttccaaatataataatcccgatacggattatccttggaagaacgggattgctggaaccacttatgatcagtagaagagtgattcacaacgatatcaatcatcagtttcatatcacgagccttcagacctttcagcagttcgtcaaaatcctccatcgttccataatccggattaatccgataatagtccgctacgtcatacccattatcatgttgcggagatacatataccggctgcaaccacacaatatcgatacccagatgctgcaaataatcaagcttctcggttaatccacgaatatctccagtacccgatccggttgtatcattaaaactcttcggatatacctgatacaccgttgatgtcttccaccaagatgacggagttgtgttattagaactcatgttaacgcctccaataaattgtaatgctcttatgtgatgttctcggctaacttcatatctatattacataagtaaacatgtatatacaagttgaaactataatatgtatattctccgcctcttctacacattccccataaatctttcctctgtaacatttattttggaacctgcgttcgtgaacccaatgatatctgtattgggacaacaagaaaccgtctattctccccaccattggagtgggcaacagacggtctaatttggttgaacttggttgaatttttcaaaaacgcctcttacgacatctccggtgaaactacggctttcccttgtttttcctgcatattcaacttcaatagagatagtgcagcttgctcttctctttccagttcagcagcactgatctcaccagagagtacggcacgcattcgcttttgatccagcagaccttcccattttgccaccacaaatgctgcgacacagttgcccatcaggttggtgaagacacgcatcgtatccatgaatcgatctgcaccaagcagcagagcaaccgctgctaccggaaaagcattgacagccactgccgttgcggacagggccaagaatgcggagccaggtactcctgccatgcctttggaacttaacatcaacaccagcaaaatcgtaatctgctgcatcaatgtcagttcaatccctacggcctgagcaacaaaaaccgttgccaacgataaatagatcgaagcgccatccagattaaacgagtaccccgtcggtaccacaagccccacaaccgcacgatcacaacccgccttggtaagtttgtccatcatgcgtggcatcaccacttctgatgacccggttccaatcgccagcatcacttcagaacgggtatacttcacaaattgcaggaaattcagcccggtaatccaccaggcagccaatgccagcatgaccaaaaacagcagtgctgccccgtagcaggccagaatcagcagaccaaaggaagacaatgtggaagccccataagcacctaccgtgtaggccatggctccaaatgcaccaatcggcgcgagtttcatgatataaccgatgatacgaaacacaatgccgagcaagttctcaatcagcgtcagtacattctcttttgccttactctctgttgctgccagggcaaccccgaacaggcaggccacgagcagtacttgcagaagtgcattttgtgcaaaggcatctacaacacttgtcggaataatattcatgataaagtctaccgtatgcggtaactcggaaccattggtttttgcttcaatgccgcttgcgtctatggttgaagggtccacgttcattccggaaccggggcgaagcagattggctgttcccaatccaagtaccagcgccactgtagttgcaatctcgaaccacacgatggctttcagtccgatgcgacctaccgacttcagatcaccgatcttggcaatacctgtcacaatcaccatgaaaatcagtggtgcgatgatcatcttgatcaatttgatgaaacctgttccgagcggttgcagcaggctacccagatccggccacagaatgcctacgccaatcccgatgattaccgctacaataatttgaaaaaataatgatttcataaatgacatgaacgctccccctgtttgcggtcaattcggatttccgtttggtttccgtgtaactttttatatcattctaaaagggagttcaacaatggaatttcaatgtttttgttatttgtaccaactctattggtgaaaattgaacctgaaaccgaaaaaagacgaatatcgcgtcagttatcttgacgtgatattcgtctttttccataaatccatttattattgaacaggggttaaatgtgcatcacagggtaatcgattctcccggggccagcacacggccttccaacccttttgcagccagttgttgcacgaagtgttccgcatcctgacgaatcaccgggaatgtatcataatgaaccggaatcgtcagtttggcattaaaccattcggccgcttggagcgcatcctcaggtcccatggtgaaatgtccaccaatcggcaagaaggctacatcaatatcatgacgatcaccaatcattttcatatccccgaagagacttgtgtctccagcatgcaaaatcgttttaccaccaatattaatgatatatccagcaggcaaacctgcatacatgatccgttgttcttcttcgagcacaatcccggaagtgtggaacgcctgaatcattttagcttgagcaaaatcaagatctaccgttccgcccatgttcatgccgagtgtatccagacccttccaagacatatatgtagccaattccacaatagccacaactttggcgttatttgctttggcaataggttcagcatcgaggatgtgatccatatgtgcatgtgtcagcaacacaacatctgtcttaatatcttcaggcttcgtgacggcaagctcgttgccacgcaggaagggatcaatgatcagagacttttcttctgtgcccagctgtacactggagtgaccgtggaacgtaatattcaacaacttggattcctcccgacatatgttttgattattttgaaaaccactatttattataaatcatacctcttcaccaacgcaaaatcacgctagcctccgtgtcaccgctgcttacgatatactcttgcttcatacggctgaagctgaatcgcaccttcatcggtagaataacgtctgctcacattgctgatgatcagcttggcatgctcggaagtccaaccttccggccagtgcatctcaggttcatgcccacggaaattcagaatgaccagcatctgctcatcatccagcgttcgggtataggtatagatatccggatcatccggcaacagcaattcatacgcgccatagataagcactttatgttgtttgcgaagcgcaattaacttacggtaataatgcaaaatggattgcggatcactttcggcatcagccacattaatctcaagataattatcattcacctgaatccacggctgaccctgggtaaaacctgcatgttccgtctcatcccattgcatcggcgtgcgggcattatcgcgactcttcagccagatcgcctgcatgacttcatgcttcgacttaccttgaccaatgtaatgattgtaataatttttggtctcgatgtcccggtattgttcgatattcgggaaagccacattggtcatgccgatctcttctccttgatagatgtagggggtcccttcgagtgtaagcatccatgtcgccagcatctgagcagaacgcacccgatatttaccatcattaccaaaacgggaaaccggacgtggctgatcatggttccccatataattggcgttccagcctctaccatgtaaaaccgtttgccaccggctcatgatttctttgagatctgtcaatttccattccttatagttccatttaccaattccggaggatttagcatcgataaacatatgctcaaactggaataccatattaagctcatcacgatccgtccccacataagccaaagcctgctcaggtccaagtcctgaagtctcgccaaccgtcatgggtccgtagggtttcaggatcatgttattcagtttcttcaggatggagtgtacctgttccaagttggaaaagagctgatacgctggaaccaccggcagattatccggattgtgggcacttggcagcccctctgccttggcgatatgcgctactgcatcgaaacggaatccgtcgacccctttttccagccaccaatgcaccatctcatacatctcttctgccatctgtgcattgttccagttgagatccggttgctgttcggaatacagatgcagataatattcatttgtctcgggatcatgcttccacaccgaacctccaaaataggactcccaattattcggcacctgcccatttttgcctgaacgccaaatataataatcccgcttcggattcatctttgacgaacgcgattcggcaaaccacgcatgttcatctgacgtatgattcagcaccaggtccatcatgatcttgagaccacgcttgtgggcctctgccaataatcgatcaaaatcctccatcgtgccatacttgcgtaaaatgccgtagtaatcccggatatcataaccgttatcatgtcctggtgaatcgtaaatgggacagagccagatcacatctacgcccaaattctccaaataatcgagtttctcatagattccctgcaagtcgccatatccatccccgtccgaatctttaaagctgctcgggtaaatctggtataccacactctctttccaccaaacgatatcgcccacctcgctctcatcattgttcaatatataatctctgctcactgtattaagccgttaatatgttttatccgaaatgattcccttgtaaacatttgaaaggtatcttatgcaaaaagacccggtcatggaccgcgatctgcggttcaattccgagtccttttttgtgaacataagactaatttaaatccggcgtaacctatccaggcaccgatcgtgttcagaataatgtcatccacatcaaacgaacctacacgtgtaatcaattgtgtgacctcaacaccaagcagaagcaaaacaactgtagatgtaaaggtccgaaatgtacgacacctccgaaacaaccatggaatccagatgcctagcggaatgaacaatacgatattgccaaacaggtttttgacccaggtatctgtattgtacctctccctctccataagaagtggacgaatcgtctcgaagggtacgagattatattgataatacatgcctggtgttcggccactgatgaacagtaaattgcccataatcagtatgtagagcgctgccatgcaagcaacaatggtcagcgtccacttggagtggagccacgacttttcgctcattcatcccgtcctccgaccttgaattccgcgaagcggtaaggtctattttaacgggatatagatcttcatgtccagttgttcaggggtcgatttccagacatccgtcacttcaaaatctggtccttccctccgttcatagttcgactgcggcaaccagctgccatagatcattttccgaatatcctgcccggagccttccacggtgaactctgcatacaagccgcccggaatttcaatcgaagtaaaaccgggttcaagtacctgcgatgctccactgctttcttcacccacaataaaagaaaatgctccatcctcttcaaaatgacaggccacaccataagccatatcagggcgtgtcctctccgggatcgccatgaatttctgttccatgccaaaatcgtgataaaatccgggtatttcagcataatgatgattgtcattcaggttggtcttatattcatagccgacaatccagttcggttcccgtgtgaccagacggggtgtgttcatgtggaaagttccatcaagccgagttcgataatcgttaaaatcaatgctctgttgcatcttcagaagagacaactgatccacttccagcttacgcagcttcgccggtgtcattccaaagtaggctgaaaatgcacgggtaaatgcctcttgagattgatagccaaagctcatcgcaatgtccaatatgccttccgatgtgccccgcagcatccctacagcttccgttaatctgcgtctgcgcacgtactccagtaccgtgaatcccgtgatcgcctgaaataaacgctgaaaatgaaacgccgaaaagctcgcagcagcggacgtctctctgatattaaaatcatcttgcaaatgatgctccaaatactcaatagcaagctgaattcgtgtgtaatgatccatagtgacggctcccctatctaattcaaaatatcaaacgatttcttatgtagtatgactgagatccagatcttttttttgattttgtgtgcgaacttgtatgacgaaagatacgcgagttccgattctcttcaagttgaatgacactatgatacactgtatgccaaaaaccccttgttctacaaggagatgctctctacgctggttgatttaccaacagagatagctcttgtgaacaaggggacttgtttgtttaacaatctatgcttaacctttccagttcccggacacgggatgaataccccagatatctgtcgcatactcactaatggtacgatcactggagaatatgccggaatgtgccgtgtttaatatcgctttccgagtccagcccggaatatcccgatacgcctggtcaatcgcagcatgcgcgtcggcataagcagcaaaatcacgcaatacaaagtattcgtcaccatgggccagtaaggagtcataaatatcccagaactccccgtcacgataacagaatgcacctggatgcaccagttgctccacgacctcgcgaatgcgttcatcgtgctgcacgatctcattcggacgatagctgcctgaacgataatactcaagtacttcgtctgcacgcagaccatagatgaacatattttcttccccaacctgctccgccatctccacgttggctccatccatcgtgccaatcgttaaagccccgttcatcataaatttcatgttgcccgtaccagaagcttccttacctgcggttgagatctgttcactaacatccgcagcgggaatgatcttctctgcaagagagacggaataattttcgaggaaaaataccttcaagcggtcattcacggccgcatcccgattcaccgtgtcagccacgttgttgatcaacttgataattttcttggcaaaataataactcggcgctgccttggcaccaaagatgaatgtacgtggtaccatatcaaacgaagcatcattcttaagccggttatacagatgcataacatgcagaatgttcaacagttgacgtttgtacccgtgtagtctcttcacctgtacatcaaagatggaatccggattcactgctgtcccggtatgatccagaatataggcagcaagccgctctttgttatcccgcttaattgaacggaactgctcctggaatgatgtattatccgcaaaaccagccaactggtccagcttgcccggctctgttatccattcgttaccgattgtatccgtgatgagatccgacagtttcggattggcatgcatcaaccagcggcggtgagtgataccattcgttttgttattgaaacgctctggatacagttcatagaacggagccatctcgcgctctttcaaaatctcggtgtgcagagctgcaacaccattcacgctatgactgcctacaatcgccagatgtgccatccgtacctgatcgtttgcaacaatagccaaatgccctatgcgatcctgatctcccggataccggtccagcagcatgccacagaagcgtttgttgatctcttcaatgatcatgtagattcgtggcagcagcctgctgatcatggatacaggccacttctcaagagcctcactaagcgttgtatgattggtatacgatacagtacgggttgtgatatcccatgcttcatcccagccgtaccccttcacatcaatcaggatgcgcatcagttctggaataaccaaggttggatgcgtgtcattaatgtggaaggccactttatcaggcaaacgatcatacggtagctccagcttgttgaacgtacgcaaggcgctctgtacacctgctgagcacatgaagtattgctgcttcaatcggagcaactttccttcatactgagagtcgtccggatacaggaattctgagattgattcaaccgatcggctataatccagatagccgtagtaattcgaaggggtgtcaagtgaagtcccgcgctttggctcggcactccatagacgcaatgtattcacatgggtttgaccataaccgatgacaggcacgtcatagggaatggcgacaaccgattcggcatcttttgtaacaaactgatattctccatcctgctcatgagcttctacccggccccagaactgtacttccacctttttgtctggacggcggacttcccattcattgcccttatccagccaattgtcgggtaactctacctgattaccattgatgattttttgctcaaacaacccgtatttatatcgaatcccgcaaccatgtcctgcatatcgtagtgatgcgagtgaatccaggaaacaggcagcgagtcgtcccagacctccgttaccgagtcctgcatccgcctcctgttcttctatctcctccaaggagaagcccagctcagctaaactgtcacgcaccaattccaattcattcacattcaacagattgttgccgagcagacgtccaatcaggaattccagcgagaagtaatagacctgtttatcctggcgctgcttgaacccctgattcgacgttgcccaatcctgtcctgcatattcacgaatcatgcttcccagtacatggtacacgtcttcctgtgttgcttcttcaatcggtttgcccaatttgctgaccagattccgtgtaaatatactcttgaacgtttccttgttgtcaaacaaaagtaggttcctcccggggaaatcctgcaggatggtggcggttcatacaaattgaactagagaatatttacactggacacttcgatgacagaataaccttccgatcgctgttatccccagatttttttgattccttttaaaatgggaaaatccggggataaaggcgagcgctgcgcttcttcaggttatttctgtcctctccgttttgtgtaaatgtttaagttgaatttatataatcaagggtaaaatttgaagccaaaggcgaacgctacgcttcagaatcgatttcgtcccctccactacgtttgcatgctggtgagaactttcgaagatgcaattcatgcgtcgaaagtgtatgaaccttaaatccatcctacaggatttttattttatatatatttatagaagatatcggttacgtgtgggcattagataatagtacttttcgctaaaatgtatggattcgacgggtcgccgatcagcgtctgtcctccggtcagcttcacgtctttatcaagaatgacgttctcaaggaccgtcccctcaccaatgtaacatttctgcatgatgatggaaccttttattttggcacccttggccacctgtaccccacggaacagaatgctgtcctccacctctccaccaacaatgcagccattcgcgagaagtgaatgtttaacatcggcggtatccaggtatttggcaggcgcttcgtatttaattttggtctggatcggatcttccttgaaaagttgttcatattgccctgtgttcagcagatccatactgttgcgataataactgtcaatggaattgatgactgcgtgatagccatcatatgcatacgcagcgatattcaatccatccggatttttttgaatcacatcccggaagaaatggctctcgccatgatcgatgcagcgttgcacctggcgcaagaacaattctttttccataatgaaaatttctgtatatatattcgggtgattagcgctttggtgaatgtccaccacgttaccgtccccgtcatgttcaactttgacacaggcgtcatgctcaggtagcagctgatctacttttttgcagaccagtgtaacgtccgctcctttactgatgtgatacctgtagacatcctggaggtctgctttggtcacatggcgactgcccgcatgcacaacatattgtcctgcccctctgtggaaaaagtccaaattgttatggaaatgctgcaaatccccttgtgatgtatctgttggatcgttccagtctggtggcaaaataaacatgccaccatgcttgcgatccaaatcccaaggtttaccgtcaccaagatggtccatcaacgagcgatattttcgccgtacaaatacaccaatactctcaatgcctgcattcatcatattggatagaacaaaatcgatcagacggtaacgcccggcataaggcaccgcggctccgcagcgaaaatacgtcaattccttcaattcttcaagttcatggtcaaggttaataactccgatcaattgtttcatcgcatgcaccgtccttttgacttcaattaggccttgctagttattccttggcgaagctgacgttccagttcttcctgatccacgagcaatatatcactctcatcttccggtgcaggcgaaatctgtgttccatccggaataaccaatccttctgcgataatagctcggtaaatgcgcacattttgcccgattttcactcttggcatgatcaccgaatcgatgaccgcactgttctcaccaacttcaattccatagaacagaacagaatgattgacctcaccatgcactacagtaccttcactaataatacaattccgcaccttgcccgaaggtgagatgtattgtgcaggttggttcggattacgtgtgaaaatacgccagtccggatcattcagattaaacggtgtgtcttcgtccaaaaggtccatattggattcccacagactgcgaatggtaccaacgtctttccaataaccttcaaatggatacgcatataaggatttttcattttcaagcaataaaggaataatatctttaccaaaatcataggaggtggatgcctgttgttcatcctggatcaggaaacgtttcagtacatcccacttgaagagatagatacccatggaagccagtgtgctcttgggttcaggaggtttttcttcaaattcatagatgctatagtcatcgttggtgttcagcaccccgaatcggctggcttcttccaatgagacatcaatgaccgatatggtgcaatccgcatctttttctttgtgatactggagcattttttcgtagtccatcttatagatatgatcccctgacagaatgagcacatgctcaggatcgaattgttcaataaagttcagattacggaagatcgcatccgctgtaccccggtaccagttgctaccgtcttcacgttcatgtggaggaagtacatataccccgccgtttttccgatccagatcccagtcactgccaatgccaatataggaatgtaagacaagtggttcatattgggtcaatacacccactgtatcaataccagaattagagcagttactcagcggaaaatcaatgattcggtacgtgccgccaaaatatacagctggcttagccagtgatttggtcaatccttttaacctcttaccttgccctccggcaagtagcatcgctacaacttcttttttcgccatcattacagcctcctccacgtgcattcgttctgattcatttcagagcccataatcgatattctgttgtgtggacactgttgtcttgattaggagcttgctgtacagatgtgtaaccggtgaatctttgtttcagttgaacttcttggattgtaaagcctgaatagagatgatgctggtgtagaattgcttgactgtcttacagaggtgaatgttagatgcagaacttaaggtgtagctcgtgaacaatgaaatagtctactcctatttaacattaaacacgaaacggactggggaatcttactggaaaacatcgacatcaagttgcgggtaagattaccccttctcatgccgctgttattcatattgtattcgatataagagaagtaaactccttttggaaaattcatggtaaaagtgtgacactactagacccataaacctataaaatcaaaaatgcaggtcttacgaatcagaaaatggcaatttatttgtaaatttttagaggaatatatagaaatgtgtcgaatagatagatgtagtatagaagttatgatcagatttgccaaagcaatctatcaggaatttacat

SEQ ID NO: 2 - DNA, 990592 bp, Paenibacillus xylanexedens
  source 1..990592: mol_type = genomic DNA
ggattaagaggtagaatagatatgatagataaattatgatgctgccatatgtttaaagtccgatagctacgaagttgttagtgaacaagcatattagatcacactaaagtataagtaaataaacgataaaatgcagaacaagagcagccccgctcaaccgaaagagtcggtgagaggggcttttgatgcttctcgtgccgcgtgtatctcctgccatggtgtaatgaaagtagcatttggtgaaattttcacaaggcatacagagcattgggacttttgacatgcggtgcagtgaggattactcatcaagatgagccgtcgagtgttcaaggccatcatattagctgttaagttattttacttttcgggtgctaggcatcgcacatactggtctttcattcgtaagcttttacatgcccagccccatccatcatatatttcgtcatcgatgttgagggtcatggtctcatccgtatattcattccagttttcaatccggagtatgttttcactttcccattcgagatggttatttccgtggtgcttggcacgatagatcgtttttaccgtggcgtcctcaggtgcatttgtcttcttaacatcgacccagattgtaacgccgcctgccgcaccaccgtaaggtataccgtaaatttcggcagtatagtcaccattacgtgaaggcatggaatagcttaattctcctttctcagaacggtcaaacgtggagaagtaaggacggagccagaaatacaggaatacagcggcaaacagtacaagaatcaacaatgtaaatgtagtgagaatagggtgtctacgtatccaaggtttgcgaggatttgtatgggatgaacttgaattagcttgagtatttgagtccataaggttgaacctccatatgcagcttacagtgaaatttgctttgcaggaatataaatgtccaactctccgtagtggtcctgagccagactgccgtcaattctttcaaaatagtagggatcactcttctcgtaccccgaatggctctgccaatattcatcgataaatgtccagacactgtccagatgatcaatattgatgagacttggatggaaatcacagacaaatttgaatacggcatactggttggctggtacctcaattccgtccagttcttcagggatatgatccagactggtgacctctacagacggctgatatgtactgtaatcctcgttaatttcattggtaaatccgatatatacgttgggttgcaacacgttaggaatcgaatgaaagtgtttttcaaaaaagtcgttgcctgctgaattggcttcataatgctcttcgttatctgcataccgaatatgggaacgctgtccgatgagtttcatgaccggttttcgtacatacgttggtttgaaaatatatccatacggaagtattgtgatcatggatgaagtcatacgagctgtgaattcaaggtctccagctccctgtttgcgatattgcaagggtgtgatcccaaaggcttgtttgaaagcacgtatgtaggattgttcatgttcaaaagcgtaatgtccgctgatatcgataatcttccagttcagattcaccaattgctccaggctgcgtgccaatttgcgtgaacgaatgtattctccaggcaattgtccgctgacatgtttgaacatgcgatgcaggtggaatttggatatatgagtcacagatgccagatgatccagcgttaatttgtcttgaatatggtcttctatgtagtcgaatagcttatccagtgtgtctagcagatcgtgttgcatatcaatctccctacttctaatagtacttacagcaataaatgttcattttttccttatcaccgatgatatcataaccaagtacataatttaatgacaagattggagaaagcatccatgtttgctgacaaaaaaaattatacaacgttaggcatgttaactcgattatggacactaacgggcaagtaccgtatgttcatcattctgttacttttcgccgcatgtatggtctccctgattgaggtcggttatttggaatcgatccgaagactggtcaaaggcgcgactgaagcacagttttcgttactctactcaggtttgatcataggcgttagcattgtagtattacgattgattgtaaccgcattcatgacgagggtcgagacgttattccagcaaaagacattattgtctgtgcagtctctactgctctcagcctttagcaacacagagacacgcgatctggcacattatcatacgggtgacctaacctctagggtctggacttcagccaaggaagcacagaaggggatcaaccaacatggcattgaactcgccaaaaatatcattcagctgattcttgcctttgcttacttcagctgggtgaacttgccgctgtcgttggctatcattgcattcacattgatctatccttttgtaacggtaggacttggtaaacgtctacaaagacggcatgatcagttgaatgccagcgcagcgtcaagagatgaaattctgactgaaatcatacaagccccggttgagatccgaagttacggactcgcgggttatgtacaccatcattttaaagatcgaatggatcaagtgttcagacatacgatgtctgtatctatgttgcaacgactttcggaagcagcaggacgggtctccacgtatggtggcatgattctgattctctatctaggcggcatgcaggtcctgaatggacatatggatgtaggcggactggcagcttttctggtagcaagcagtcagttaactcgtccgattgagtcgttatccgggctgtggaatgattttattggttcggcttctcatgcgtccagaatctttgaagtgttggatctggagagaaagaacacagttgctaatcccagtacaaatacatatgtacagtccgatacgcatttggggcagcttgaaaagcattctaaaccggctggcatcaacgtgcagcatgtgtcttacaggtatgcggagcaagaagaagtgttaacagatatttcttttgaggccaagaaaggaaagcttactgtaatcacggggccaagtgggtgcgggaagaccacgttattgaaattaatagtcggattagatacacctgttactggttcgatccaggtgatgaatcagaagaattcactgaaggatatgcacgaagttcagactgggcatgtcaatcaggtgtatgttccgcaacaagcctttattttcacaggaacagtggaagagaatattgtttttggacaagagggggtatctgccgatcaagtagaggtcgcggcccacatgacacatgcacatgacgcgattatgcgtcaatcgctcggctatgggacagagcttcagccacaaggcgggacgatgtcaggtggtgagcttcagcgtattagtttagccagagcgatgctgaggaatcctgatattctattgttggatgaaccgacgtcatctcaagacccgtggcatgagcaacggttgaatgatctttttgcaagaatcactgctgacaaaggcacaacggttattgccgttactcatcgattatcgctgatagaacgggcagatcaggtcatctatattcagaagggacgcgtcgaagatacggggactcatcgtgaattgctggatcgtccaaacggatatcgaagttatattgcggagcaggatacggaagtggaggaacagcatgagtaacaagattgaagatgcagcatatgccgatgacgttgaaatgaaaagcagtcatgagaaaagcggagcatatgagatgaatgaaaataatgaaaatgaaaatatcgaaaatgaagctcatcatcagatgaacgaaagtgatgttccagatgacccgaaacaagctgtatcattggcaacggtgtggcccgttatttttcgctggatgaagccttatggattagctgtagcgatcttgctcatttttatcgccgcagatgcggtctttgattggggacttgcctttgtacagggattcttcgtggatgctattcatgatgggggacaggagcagttaaacgctacagcgttgatctttatcgccattctggcagggtttatcgtattgctcgcgatgcatcgttatgttctggtatggctcaaggaatcgatgcaacgggatatgtccatggatctgttgaaactgttaaaccggatgccttatttctgggtgcgcagacagaagtccggggatgtgatgcttcgcatcaaggaagacaccaagcatggtgcagaagttgtggaggctattgcagagggtgttacggttgtattcatcattgctctatcgctgggatatttgtacagagcagatgcatgggttgcggttatcgccttggtaagtgcaggggccatctggttcacggcgaggttgtatgatcagcgaattgtacatctgtccgatgaggtcgaatccagggaaggcgagtcccaagaacagatccaacagtatgttgaagggataccggtgattcagatgtatgatgcttcaccgtggtttctcgctcgttttcggacacaacagcaatcattgaatcgtgttcaggctaagttacagatgaccctgagcatgtcggataacgtggcgatggcggtgtttggtctcgctcaattggcagcgctgttccttattgctttgtcagcggctaggggaactttatctccaggcatggttgttgcaagtagtctgctgtttgaactggtggtgtggccagtactcggcttgtccagccagtggagtcagatgcaagccagcgtgggtgcatttggacgtatctctgcatggttgaagttggcggagaacaagaagactgacacatccaatactaagcacgaagagcttgcacagggaatttgtaaccaagatcaagggaatacacaaaaaggggcacatgaagagaacgaaattgctatgctaggtcttcaacaggttacggtaatagatgaaatcagtgatcggacgattttggatcagattacgcttaatctggttcctggtgaactggttgcggtagttggcgccagcggtgctggcaaatctacactgtgccaagtgtgtgcagggctgatcgagccaacaaacggaagcgtaatgctgggtgataaacatgttgcagagtatgtagagatggatgaccagtccagactcacgtatatgccgcagacaccgactttttttacaggaacgatcgaagaaaatattcgtctgagttcagacgttacatcggacagagtgaagcttgcggcaaagcaggcaggtttgcatgaatatattgaggcacaagaaggacaatacgcagcaatgttgcatgagaaaggggccaatctatctggaggccaacaacagcgactgtcgcttgctagactcttcttgaggtcatctgatctgtatattctggacgaaccaacgtcatcactggatattcagacagaacagaacgtgatgaatcacttgctgaactttatgaaaggcagcataggattgcttgtcacacatcgtatggaggttgctcgtcagtgctctcgcatccttgtgatggaacatggccgaattgccgaggatggaacgcatgaacaactgatgcagaggaaaggattgtattatcgcatgaatgcaagagacggtggtacaacatgaatgaatctggggttaagaaagtaacggatacgctggagttcttgagtcaggatcgggaagcacgtcgtttgtatgaagagcgccagaaatatttacatgacgaagctactatgattgagtgggctacggaaaagggaatagcttaaggaatagaaaagggattagtagaaggggaacaaagaaagacgattgaaattgtgaagaacatgctctcactaggactcgaagttgctgttattgcaaaggccagtggcttgccggagtctgaggtagagtcgttaaaagattaaagtgaagttgtaaggttgtaaggtatagtagcttcaccagatgaatgggtacgggtacactagcgtgatatgagtgtgtcggttgtgaataaaagtttacagcaatcgttttgtccaactagggcaggacggttgtttttattttaatgaagaagcttcaaacgttttacagtaaaacgcggttgctcattccgggctgggccgttaaactaaagggagcggcgtttgcttgacggacaagtcatgagaacgccattttgttgtcaaggatgcgggatatgagccgctttcggatgtcagaatcggatcggaccaagctggtggaaaaacaccggtgataagtaaggagtctttacatgagtgtgcaaacacctacattagaagaagcgcagggtctcctgcaaaaatattatggctaccccgacttccgtgagggacagaaaaagattgtagccagtctgctggaacgtgaagatacgttgggtattatgccaactgggggcggtaagtcgatctgttatcagatccccgctctgttatattcgggtctgacacttgttgtttccccgttgatctcattgatgaaggaccaggtcgatgcgttgacgaccgccggaattgctgccgcgtatattaatagtacacttagcggcaaagaagtgaatgatcgcatccgcgcggcgcagcgcggtgagctgaagttgctctatgtcgcgcctgagcgactggagctggattggttccgcgaggagatgggctatttgccgatctcttgcgttgccgtggatgaggcccactgtgtatcgcagtggggacatgattttcggacaagctacctggcagtagcgccgtttgtggatagtttgccggagcggccggtggttgcggcctttacggctacagcgacgcccgaggtcatgggcgatattctgcggttgctgcgtttgcaggacccgcagacatatgtgactggacttgggcgggataatctggcgtttagcgtgctgcgcggcgagagcaagaaggactttgtcctgaattatgcgcgcgagcatgccagcgagccggggattatatacgccgcgactcgtaaggacgtggacgatctgcatcagcgtttgttgcaggcgggattgcccgcaggacgttaccatgccgggatgacggacgatgaacggtcccagagccaagaagcttttttgtacgatgatattcgagtgatggtggcgaccaatgcgttcgggatgggaattgataagtcgaacgtgcgttacgttattcataacagcatgccgaaaaatatggaggcatacgtgcaggaagccggacgtgcaggccgggatggagagccaagccagtgtattctgttattcggggcacaggacattatcacccagaagttcctgattgagcagaatccgatggacggcgaccgcaaacaaaatgattaccggaagctgcaacagatggtggattactgttacacaacgcgttgtctgcgcagtgcgcaactcgattatttcggtgaggtgcatgacgatacaccttgcggtacttgcagttcctgtacggacgaccgcgagttggtagacatgacgattgatgcacagaaaatattcagctgcattcaccgcatgcgtgaacggtatggtgtatcgctggtcgcttcggtgctcaaaggctcccgtgccaaaaaagtgcttgattacggcttcaactctctgccaacttacggcgtgatgggtaatcggacagagcgcgagatatcggagatcatcaacgtgatggtatccgaaggatatctgatgctgtctgagggacagtatccggttgtgcgtttgcagccactggcggtggaagtgctcaaaggccagcgtgaagtgatgcaacgtgtcgtccgcaagacagcggcgacggcttcgggtacgaactatggcggacgccgcggacgcgatgcgatgccatctgcggttaatgagacggtatttgaacagcttcgtctgatccggcgtgatctggcggcgaaagagcatgtaccatcgtacattatcttcaatgatgcgaccctgcgtgagatgagtgtggtatgtccacagacagaacgtgacatgctggatatcaaaggggtcggtgaggtcaagtaccgcaagtatggactgccgttcctggagtttttccagaagcaatcgggcgaagaagtggatgcggatgatgatgcgttttacgagtatgagtgagtatgaaatgagtaagagtgagagtgaattgagtatgaattgttaattttcactttctaaactttgaagttggttgtcgcgtctctgtagagtggacgaatggtggcgtattgtctttcaaagggtggacattggcgttaggaatggctggccgtatcgtatacagcatgtagttttattatatgtgtttcatactgtatgttgtggtttgagtttggcggggtgtatatgtctttttgaaaagagtgtccactctttgaaagacaaaagttggatatgtccatgagacatggaatggctagttcaaaagaggtttagatgaacagcgtccggggcaggatggctgtgcagctttctttttaccaaaaatatatggtctgggtgtccaggcaaaggttgtgaaccatgaaggttattctttctacattaaatgcaaagtacatccatacctccttggccttgcggtgtctgaaggcatacagtgagaaggattttgatattgacctggcggagtatacgatcaaggacccggtgatgaatattgtgtctgatctgtatcagcgcggcgcggacgtgattggtttctcgtgttatatctggaacatcgaagagacgatcaaggtcattgataatctgaaaaaggttatgccgaacgtgaaaattctgctgggcgggccggaagtgtcctacgacacggaatattggatgaaccggattcccaatgtggatttcatcgtgatgggtgaaggggaagagacgctgcatcagcttttgatggagctggaaggaagcaagaagttccactttgtctatggactggcatatcgcaaaggggaagaggtcattctcatgccaggacgcccaaaagcggatctgaacgatctgccatcaccgcaccgttttgatgaggatatcccggagcttgggaaacgggttgtttattttgagaccagtcggggctgtccgttcagttgtcagttctgtctgtccagtatagaggtcggcgtgcgctattacgatattgagcggacgaagtcggacattctgtacctgattgagaagggcgcaaagctgattaagtttgtggaccggacgtttaacattaagcgggattatgcgctcgaaatgttcaaattcctgattgagaatcatcaggggacggtgtttcagtttgaaattacggcggatattatgcgtcccgaggtgcttgattatctggcagagaatgcgccgccgggcacattccggttcgagatcggagttcagtctacgaatgatccgacaaatgaactggtgaaacgccgtcagaactttacgaagctgagccgtacggtgaacaaagtcaaagccagcggcaaaatcgaccagcatctggatcttatcgccggactgccggaggaagattacaatacgttccgcaaaacatttaatgatgtgtttgcactggggccggaagagcttcagctgggattcctcaaaatgctgcgtggtacaggtctgcgtctggatgcggagaagtataactatacgtacatggatcacgcgccgtatgagattctgggcagtgatgtgctcccgttcagcgacatcgtgcgcttgaaacggttggaggatgtgctggagaaatactggaacgcacaccgaatggaccatacgctgaagtatctgatggagcaagagttcaactcaccatttgatttcttccaggcgttcggggattactgggaaggtcaggggtggcagaagatcggtcaccaactggaggatctgttcactcgtctgcacagcttcctggagtcgcgcaacacgccgcatatggatatcgtgctcggcctgatgaagctggattatttcctcggccacaaatacaaaccacgcaaaatctggtgggaagatccgcttcagaaagaccagtgggcgggttatatgaaaacgttggctgaacgtccagaagacgttcgcctgccacgtgttgccggcgccgcaggcacggcatggctggaaagcagcggcacgggtccgagtgccgctgcgggaagttcggctgctgccggagaagactctgccgcagatgcggcgggtgtgatcggcagcgaagtcggggatgcagcgtcgctcacttcaggcgacgcaacagggtccgccgcggatggagcggcggacatggtggacggcaacgcttcgcgtgcgttgccgatgacctcggccatgaccgcacagacggtcatgggtgcccgtgctttcgccgaccttggtctcggcgaaaaggaactgcagaagcacaccgtattggatgtgcttccgttccggcttgagcgtgtgctagctggcgccagcccgcttaccgcgaaaggccggacgctgctggtcgttgtgtaccagcagcatgaagggcagcaggcgcagtattacacgctgccgctgggagaagaagccgctgctatgtaggtgcagcggcctgagataagctacatggctaattggtgccatgtagcaagaggaagcgccacgactatgaggtcggggcgcttttttttacaacagcaaagctctcatattaaggtactgtaaaaaaacctagaagacacggaggccacagaatggatctgaagacgtacctggcagagcattttccaaacctgaccttagagccacctcttttttataattgggatgttgcaatacgattcgaacttggcaatcctctgatgtttggaatgaatacggagcattacatggaaaaagtttatcatcgatcacttgaactatttaaggctcttcatgatcaagaagatgaagtcctattaataactcaagcttattttgcagataagcctaaacacaaagcgaagaaattgaacctgtacagaaaatatatcaagaagaaagggccgattagagccttgagccttgagatatttccaggtttggattgtgaaacggatgacatctcagacccaaggaacaacatgtataggtactggactaaatgtagagttgaggacttgagatataatcagttaatcaaagctatatgtaatcatgatgttggaattaagccaaagatatatcatagggtgtatttcattaatataagtaagaaaacgatatttcatatctatgatgatagaggttgcgatgttatttcagcatcaagggaagagctagtggatacctatagagaatataacgattggattttagattatgatcgagacagaattaacaatatatttataggataatggggtggatgattgatgatccaagccaattttctgatgttgatcgcgcagggataatgtattatttgaaacacaggtttggaaagaactttaagagtgttcagatgtaaggagtaaggattatggataaaaaagagaagaagtttattattgctataattgtacttgctgtagttgtattaggagttatatggtacctaaaagtaggctatctattaaagaaaccggagatgcccgaagcaaatattgctattcagactcaaatggtggatggtggtgcgatcagtttacgaaatgctgattacacggaaaatcaaatcaaggttggatatgaagtgaaagggtacagtttggaggaatacaacattgcttgtgagctttatcgtgacggacatttgatttcaacttctggctcaacaggtggaggtttgatagaactggacgaaaagcattattacttcattggttttgagaatataactgaaatgaatttgcctgaatctatacatctaaatgtggaaattaaagtgatacccaatgattttagacaaaaatcgataactttaacatttgacgttagtcttgataaagaagtgaaatagattaaagagggtagccattcccggtgattaagacaactgttaaagggatgattgttgtatgatgaaagcctcaattcaaatggtacttcttcatgacagagtcgcgaaatgtcgcgtaattggataacgcttgagaagtggaggattgaggtaaactatattgagttatcccttcaaggctgaatttgcctaggttatagttgattaatccataatcaccaaaggagtttttcatcaagaaaagcacacttgtatcacccttctgcagttctacatagtcatcaactgtatatttgacgtctccttcgagactaacgggttcaatgatcgtcagttcgttctgatccgaagggaaatcttcgggtttcttcaatacctgttcaatcttgatgtttgtattggtgtgaaaggattgcatggttccatcatcaaatgcagtaataacatgctctcgatttctgaaatcttctgttgcataaccaataacgatcagttcagcgaacgcatccagcttatctatttcatgaaatgttaaagagttggctgaaaggttgacgactttatgaataggcacgttcggtttcgattgaccatttacgtaagcgattgcaacagcagagatagccaatacgaataaagagactagtacaaccttatttttgaaaaaagacatgatctcatcctctccgtcagatttaacttcttttgaaaacatcttgcttcatttctactatacacatatctgaaaattattgtaaattaaaatgtctagcaaattatcaatcctgaattaattcagtatctaaaatatgatggcaccttgtaattgatttttggaacggaaagacaaaataagttgaaggacctaaaacgtgaccataaattttgataaaagaaactcaaggagggtcctatgaagaccatcgtttatatggttagacatgcggagtcaccgtatacggaaggaacggaaagaacgagggggcttaccctacagggcaagatgaatgcagaacgaataacggaaatattaacgaatgaaggaatacattccattgtctcaagtccttatgccagggctattctgaccttagagggtgtggcagcagcgttagaattagatattcagatcatggaggatctgcgggaaaggcatttttcagatgatatgattgcggatgaagagtttgagcctgcttcgaagaagatgttcgatgacccggattatgcattgccagggggcgagtcgaacacggtttgccagagtagagcagtgggcgtgttgaaacagatattagaagaatacaagggtgaaaaagtggcgatcggcacacacggacatgtaatgacgttgatgatgaactactttgattcgagttacggattggattttatgaatcaaaccaagaaaccggacatttatcgattacaatatgacgagatggaattagagaacgtgacaaggctatggagcgaatagggtgaaagtgaataagcgagaacgcttgttcataattttggttacaggtaaaatatagatatcattaaatatggaagggattgattccattgacattacaaaacttgtttcatgaaaaaccaacgaaactatggaatgagagaatggttgaacacggagatgagcttttcacagaaaagagattactcatgtctgatcaagccctggatacatatttgcaccaattaatagcattacaagaaacgaaagattctgagcgcatgatgaaggctgtagaggaagttgtggttaggtttaatgaaatgaatgaggccaatggttactttattgaaacgatggaacgtgaagaattggctgattttatagacagggcggctaggctggctggattagacattcaggaggatgaagatattacggaagaatggagagaatggtaattcggcagaacagtgttttccaattttaatgataagggtgatcaatatggaacgaggactcattatatttttgaacggaacgtcaagttcggggaagacaagcattgcgatggaaatgaaaaatcagggagacattccgtttcatcatctatctgtagatcaatttctgcaaaattatgatcaattcatcgatactacatacccagatatgaaaccaacaagagaagtagagcaccatgtgatgacagatatcctgttcgaccccatcaattcgatatactgtgcaaccattaaactgttttcggaaatgggtttgaatgtcatcgtggatacggtcatcagcaatgacaagtggtttaacggtttttatgatttactatcggattatccgatattgtttgtaggcgtacagtgctcaaaagaagaactcaccagaagagagcagagcaggggagatcgagagattggacttgcccattcccagttcgactacatctactcctatgatgaatatgacctggaagtaaatacggaagagcttagctcagttgcatgtgcggaaaagatattaagttatatgaagtctgatcagggatacttggcatttaagaagttaagcagaagagactgaagctgattgtgtcagataatatgttatccattccaatgaaagttagggatttggccaaatctttttcttagcgttgccaggacctaataagtagatttcatcaacattcccataagtattagaaaatgaaattgtgaagtctttactaccaccgataggaagtttactgcctttaatctgaatgaataatgaattgttatgatgtgagaggtagtagccgtgatatctgctaatactgtctgcaaatccacctttaatagtaataagctcaggagaaacttcagttctcgtaaccattgtctcgtcaggatcgacaaccttgttcaacatataaaatccaatgataaaaggaataacaacaataataactgcgctaacaataatgctatacttcatgtttggtcgcatattcattattcacctcataattagatgatatgaatcgatgtctcaatactcattgggcatcgatttattgtatttaatcagaacagaattctacgtttagaaatattaggctcatttaaataatatactaattcattttttttgtagagataggtggaggttaccgatggaaataaacgctatgaatccggaagatcatatccaatacatgttacagtcaatcattgaaaagacacaatccattatcaacgatactggtaaacaatccttcggctctttagattatttcttggagcacattatagcctaccgggatgaaaagcaatacatgtctaacgagtggcatatccgcacaccacgctggctaggggagtatggaaatacgccggaggaagaagagcttctttcagacatttaccgactgcaagcatatatcactgaaacattaaagggcggataagcggcttacgatgtcgcattagtccggctcaaatgtcgcaaaagtacatggtaacgcaatgcagagatcgtttatactctctttatgtttcgataatgaaaatcattatcagtattatacataagggggattcatcatgaatcaaggaacaaagaggcaggctgccggaagcaaggcatatgctgctcacaaatcacgattattcatgggcttgatgttggcccttattcttgtcctgacggcttgcggtgccggaacaggtacagatagcggtaaacaatctgcggcaacgccagcggagacagctgcaaatgcagaaacacagacagatggagcttttcccgtaacgatcacacacatgaagggtgagctgaccctaaacgaaaaaccacagaaaattgcagtgcttgatgttaagttcctggatcaaatgttagccgttggcgagaagccggcaggcagtgttatcgctggaggtaatactgattttccagaatacttaggcgatcaaccgagtgacgtacaggtactgggtacacgggacgagcctaatctggaagcgattgtagccttggacccggatctgattattatgacagatttccaggagaagcagtatgagagtgtaagcaaaattgcgcctaccctggtacttgatttttacgaagattggcgtgatacgttagccacagttgctaagattacagacaagcaggacgaagcggagaaagtacgtacagcctatgaagagaaagttgctggactgaagaccaagctggcggagaagatgggcgatgaaacggtagctcttattcgtccgagaaaagaaggcattcgtgttcatggtatcgagcatcgcacaggcggcattctgtatcaggatttgggcttgaaaatgcctgcacttgttgaggggatcaaggatgatacctctgttgagatctcgatggagaaggttcctgacattggggcagatcgttattttgtgttgtcggatgagctgtttgcggcagaggcagaagctatggtgagtaatcccgtgtggaagtctcttgatgctgtgaaaaataaccgcacgtatgacgtaaactcaacattgtggattgcatactacggacctcttgcgattaatcttattgtagatcaggcatcggaagccctgctcggatcgaattaatatgaacccatatctctcgacagacttatggaaagagacagtggaggatcattcgattttgcttggtgagccgcctgaacatagtgtccgtaccattgctctaagtgagctgcatgccgaagcggcatgccgagagtatatcagttggttgcaggagtacatcgatgcgcctgacatgaaggttgctgcttcgatgttagccaagcgtattggttatctgtggacggctccgctggtgaccgcgatgacttttcatcatcagcatgtttcatttcagctggagaacagctttctctatcatccggcgctctcagatcatgagggcggtacacgatttccttttctagcggtgaatgggcttcaggctgaaggattaacgggagacagggcagtgtggcgggaaaaggtagtcgaggagatgtttgcggtacagcttacaccgctgttaaagacgcttgctgcaattgcaccactttcgatgagtattctctgggagaatatcatggtacgtatcggccgactattcgctcctgatgaagccgagactgagcaggaaagtaagatcattcgtgaggacttttcatatctgacgcaggtggcatccggggaagtgtttggtgagaggaagaatccgttaacccgcttcaccgattgtaaggacaatgtgcatgttgccaaaagcgagcgaattacctgttgtttctattaccagatgtcaggcgaatattgtctcaaatgtccgaaaattgacaatgagaaagaatctcaactaaaatgacaacagcaacaactttacctttgctattgtcaggagatgagaaaaatgccgctgcaagaacagacaagtctatggagtgatacggcgatcaagatgcttgacgggtatagcggtactttgcagacaggcagcgttttacacgaaacggatttaacttcaaatgtgctgctgctggcatatggaggggaaggggagcttgcaatggatggcgagggttgccacattggagcttcttttgcctgtcatgtggtgaagggatcatcctttacgctgacggccagatcagaggacattcattatattgtcattatgtacaaggcttcttccatagagggtgcctctcttgttgtaccttcatatcgcaagcatccgttgcgcaggtcatttgttcaaaactcggcaacccacgcggaatggatcgaaaacgccgaaaaaatcgttgctaaatggcgccgcggtgaaggactggaacgtttttatgccaacgctttgctccaaggaatgatctacgagctgatcatggagtatgaacgtggtcaagggggagcggagtccgacatggtggatgtagtcgcttcttatatcacatcgcactatcgtcaaaacttggagctaaaagagctggcagccctggcgggctgtagtgtaagacagctgcagcgacgattcaaacaagagaagcagcttggaccgatggaatacgtcattcagctgcgtatggaaagtgcctcacgcatgctgcgtcatacggatgcgtccattggggaaattgctgaaaaaatgggctaccgcgatatgtattatttcagtagggcatttaaaaaatttaatggcgttccaccgctacattaccggcatgccgccgcttcgagaagagatgcagactatgcgaatgctttgctgcaaaatcgcacagcttcttcctatgaatcagctgaaggcccggtcatctgccatatgcgcggggagtacaccgtcaccgaaataccacagcgtatcgctgtcctcgatgtgcaatatgctgatcatttgcttgcactgggcttgtctccggtaggaagtgtcggactaggaagtaccgtgttaacgttccctcaatcactccgggcaggactccagcatacagcattacttggtacgtatgaataccccgatctccaagcggtagagcgacttgcgccggatctgattatttgcaccgaggtgcatgatcagcatcatgaatggttaagccagatcgctccagtactcatgttcaagcgtaatgaaaactggcagaccatcctgagtctattcggtgaactgacagccaagcgagcagaggccaagcagattatcgcggattatcatcgccgaacagctttgctatccgaggaattgtcctctgtactggcaggaaaaagtgtggcattgatacgtccactcgattccctcgtgcgcgtccattctgctgctcatcgcacaggcgctgtgttgtaccgggatctgggtttgcccgttccgttatttgtggcagataccaccgacacggcctatcatatctcggttgagagattaccggcagtacaagctagccactactttttgctgagtaatgagtttatgcaggatgggatatctgcgacagagcaacgtgtctgggggatgctcgatatggatgaacgccagcacatacactcggtcgatgccgcaacatggattggttgttatgggccaacaggtattaatgggatagtggatcagattgaacaggcgttgttggcttgataggtagttgctggcgctagcccgcttgcagcgaaaggtggtacgctctaccttttttaaagttgataggctccaaagtatcggaaggtcgtcggattccctatgggatgaagaaggacctttttgttttattactataacgaaaggttcgactgcatactcgcgtcctgtacaaccctgcatatattcagcgtatttaaagcctattggatcgattggataaggggttgagaaaactaataaatctcccttattagccaattcaccttcgcaattgtaacaatatgggttatcatatacgtagttcaggcactaggaggaggtaattcaatgaaaaaaaatatagcaataatcatactaatggttggattggtaataagcatgtacttcaactatcaattcaaagcgtacaaagataatcaagaagttgaatacacggttaaactaaatcatggaactcaaatgggtataaaagaatcaatctttaatttagataatgtgataaaaagcttagaggacggctcttcgaaggaaacagtcatacatgccttaggaaatgtggcggtatctttgaaagttggtgaagaatcattcgtctttctgaattccgacttcaaggaagatcaattatcatcaaccaatttaatctacaatgtgtttagagatatgtatacgtatataagagtcgaaatcacagaggacattttatcgaataaggtatccctagaaaaagaatcgagaaatcaactgattaaggatattggagtgcttaaacaagatttggagtatattgatagtcaatttaacgaggatattctgaaagaacaaagtcctaagtggattgaaaatagatggaaagagttaattggagagattgtaaatcgaaatacggattataaattatatgaaagaatgaaaacgaaatataatctataatgagttcgtgagagactatggatataggcggataaccccgcaccaactaactgtgctcatgtagccgcaccctttcgggtgcttttaagccggtggtgggttagcatctacgaaacgacatcaaaccataaggaggccaattacgtgattagattgtgtaaaagcatggatacggatgtaatgtatcagattattaatgatgcagcaaaggcatacaaaggagtaattcctgacgataggtatcatgagccttatatgacattggaagagctaaagtgcgaaatgaacgatggtgtagtattttggggatttgaagaaaaaaatctattattaggagttatgggaattcaagataagggtgatgtatgtttaattagacacgcatatgtccgaacaaaccaacggaatagcggaataggtacgaagcttttatctcatatggtggctttaacaaataaaccgatcttaatagggacatgggactcagctgaatgggctaagaaattttacttaaagaatggttttaaactggtatcacctgatgagaagaaaaagctattaaatacctattggaatgttccagaaagacaaattgagacctctgtagtcttatgcgatagcaagagggccacttgacaaatttcagaatatacaagttcaaattaaattagattggtttcgtataatatcatattcccgggcaggggcttgtgccccttgatctgcccgtaatatttctgtggaatggataagcaggtacatccatttcctaagataagggctatctaaagggggccgtcgtgatactggaacattccagaaattaataaatcaaaacttgaagagaggttttttcctaaaaccgcttatgtttagttctggacgcttaagtgaaagactacaaggagggatataatgaagcttttttgtggaaaagaagccttaattcaagggactgatcttataaaaccttcaatatatacgcctcttggaacaattgaactttctcttgctgtctccagcgaatgttatcttcctactcactgttctcagctcaaacatggcggattgctctaccaatattactacgactcgtttgattgcgagttagtgctctgtaatctgaaccataatcttttttcacctcaggaagtagaggaatgctggggagccgtatttagaatcaaacccaatgcatatcatcagataagcacttgtagcttttctgctttgtggaaagagggatacagctgggaagattacggatctgacacgggagaaaatcttgaagctgtcgaatatgagaatgaacagtaccgctcacacataggaacccaagaaaaaccactgataatgggaaaaagaaaacaaggtgataggactcctaaatctcttaatttgaactctgcttttgagaagtgtagttttgtcttacattctgatcaaggcattgaagtatctatgacagagattgattcccaccagatatgccaagtacattttttaatagcgtggaagagaaaaatagaagaggatatttctacttggttatctgtagaccagcctacgaaaaaaattttaaagggagaagatatttggtaaacgataaacgaaaatagtatataaagaccaagagatacaactttgagcaagtggtgaaagagttgtagtactttacataaaaatagaggatgaattttaatatacttctaaggtagaaggagagaatgtaaatgaacaacttaaactctcataattgcaatctaaatataagatatgacctgcctgatgaggtgtgggctaaagtttctaaagtatatgagcggatgccagggtggattggttataaaagtggaattccatattggttcggaactgaagaggatgatgttttcattgaagcatccgttgaggctagtggattatcattttatgcacagatgaatagcgatgtgtggatgtcttggatagaaacatttaagttggaagcgacaaaagttttgggttttgatgttggtgaacctgaagatggatatatgtgatgaatgaacgagggtgtgagattcatgggcagtgaataccgccgcaggatggcataggtgtcgggatgtgttggtgcagatcatcaatggtatgctcattcagtggcatgacaactcaactgagctgcgtaaaatctatagtgaaggcatttaagttggaggatctaaacaaataaaatgatctaaagaggataaaaagaaaaaaatgataaactctattagcattgatgaacggaatgggaccacatttaatgaagagatagttatgaaccctacatgggcagacagtttacgttatttgagaaagctcgatggagataaatttacattagttttttttgaggtatctgacacaggttcagcattagttggaggcggaccggaatattttgtagtgtctattacaatggatgaacatatatatacgcttatgaacgataagcagggaaatagtgaaatttctctagttattggtggtcagttaggaaattattgcgataacatttgtatagaattaatacccatgcttgaagtgctaaagtatttttatgaaactggtaaactacacgaatcacatcaatggatgaaagaataattactggtcagttagggttctcgggctcgtaaacaccaaaggttatgtgcaattgtattaaaatatcctaacaccgggttaggcaggattataagcttgcccatgacctttatgatgaatggtgtgattattctgatcttatctagtttagtttattatttgcttagatacaccagatttagagttgttgggcgagttattctaggattaacgatatgtttaactcttatcgtaacagtatggttgtatccgcaggattaatccaaacatatttcaaaaactatagtagaagatatcaagagtttatggagtaaataaggaattcgcttggtatatattttttgattattgtttctaaagtgtttcaggtagaatgagacatcacataacaaaagtttcacgctacgggcgtgcgccctgattggaagaagtagatactttagaagcatgatccccaacacaaagaggattttaaaataatgagaaaacggcattctgttgataaagcggagtggtcagaaacaagagaaaaccagtatcacacagactgcaaggatattgcgttttcatttggcgatagactcattgaagtggatggcacggtttatttgaaacgaaaagaagtcgagattaaggcaataaaacctcttaaaagaaaaacattttggtatgaaacatggctaaagattaaagaaatctacaatacatagtctaatataaattcaacatgatcgcttaagagccagtgaaggttgattaatcattttgtgagtaatatctggaggtaattgaatgacgataatttgtctcgaaggtgccagttctgtaggtaaaagtaccacttgtcagcagttcgctacacaatatgatgcatttattgttccagaaacagggcttctttttgaatctcctcaacttgacggtaaggaacttatgatgtggttgctggagagacaaatcaatagatggcatatagcatatgagaagaatcaacaacatgagtatgtgattttggatggcgatgtatttaagatttggtacagctggatatatggttatgagcacctatctctagatgaaacagcgaacttttttagagagaagttattgaagaatgaaatatcattaccggatgcttatgtactattctgggctgaagaagatgagctgcgcaagcgaaaggagatggatcagacaagatccagaagaaattttgataaacatctgcgcatgattgaacctcaaatgagatacttccattatcttaatgaactggtaccaggatatgtaggaattcataaagcagagactgtagcagataatatacatcatatcgtaaagcatagcgagacattaccggacataaaaaaacgagagatcgaaatctttgatagagtaattgatttttacaagagtactactccttaatcttagtgtggcttttgatatcagatctcaaagctattctagctgtgtcttggataactgaccaaatactgcgatcaaagaaaaagaaatatacgaggtgcgttatgggcgtaagaaaaaaatataaacgtaaaatcgttcgctccaatcgattattttattggtatgttgaaccggatattgacgatgaaggaataatcaaattacatatcgtttctgaggataagaagttaatcgttacttatgaagtgggacaacacagtattaagaacaagatcccatttatagtcatcatcggagaagaattcgaaggctggacgttagaatacataggatacagaagagtactaacaccgaaatggagcgatgagctcatcacgccaaaatggataggtgaaatcattgattggtgcctcttgaaagataaagaaataaacatcgttaattggaaaggtgaacttctccgacctctctcttgaatggagtgtaattacatttgagaaataacttagattcgtgtggactcttttgaaaacgcatacgtgaaaacaagagaatgtaattaacatttaaaataaaaggaaagaaggaatgcagatgaatcgtggacatcacacggttaacaaagtaatcgcttgtgttctgtcattcatatttatcattatggcaatagcggtatctgcccacgctgaagagaaacaggttgagactacaccatccaggattcctttatccaagttagaggaaacgattgatgcttatgttgcctcgtatgagaagtataccgctgccgtttcggttgtggctatcaaagaaggtgaaaccattgtgaataaggcatatggttacgcagatattgagaatcagcgaaaggcagatacctctacagtttttgaatgggcttccatctcgaaactgttggtctatacgagtgtgatgcagcttgtcgaacaaggaaagcttgatttggagacggatatccaggaatatctgccagaggggtttttcaaaaagcttaaatacgatgatccaattaccctattgaacctaatgcatcacaatgcgggttgggaagatcaaacagcggccgaggtattttattactccgagaatgaaacgttagaattaggagaaacgttgcgtagaaatgagccgaaacagatctataaaccaaatagcatagtgggttattcgaactacggcgttggtctagctggttacatcgtggaagagataagtggccaacctttttatgagtatgtcgatcaacatattttcgaaccgcttcatatgaacgacacctcgattcatccaacgggacaagatcatccagacctagtacaaagaaggaatgagatcgaagggtatacaaaagatttgaaactgatccctgagaacagagtatacgtaacgttttatcctacaggggctgcgattgggacagcagaagatttaggcaaatttcttgcagcgctgatgccagtagatgacagcaatgtattatttaagaacaggaaaacgttaaacgaaatgttgtcaacaagtctatattatgaaggtacttctactccgcgatttgcgcatgggttcgttgagatggaatactgggtgcctacactgatgcacgaggggaatttgaaagcattctccagcaaagttgtctttgatccccaatctaaatttgggatggtggtcatgacaaatcaatcttttgaggaaatttattattacggacttactaaagagattttcggtgataacgtcaattctaatagagttacttcggaggggggaggatattttcaatctgcacgacgggcagcctctagatttactaatttatttacgtttcttgatataaagaaattcaaaaaagctgagttaagtagttcttatcatgttgtcgagcataatggtgttgttgagaaaatctcctttactccttacattgattacttgcctgtatcgaatgtaaaagtgaacttacttaagatatctcttattcctgttgcgctagccattattttcaatttaattgctttgatcggctatttaatccggatgcttattaacaaactacgtaaacgaggaaatcctaccaccaattttaataaatttcatcttgcaatcaattttgcaggtgtggtactccttcttaatcttttcatcatacagacgaagattagttttccaaattatcctggttattcttcgttacggatcaatttaatgtttaatctactttatgtagttctagcagtggcgtatcttggcttgcttatttacaaactgcggaagagcagttacagcaaaaagcaaaaggtgatgtacatcatgtctggcatctcggctttcatcttggctgcttttattgtgggatggaatttgtatgtgtagaagattaaacgctgaatatagatattcaaagcattgcaatggctggcggatgacttctatacatcattgatattaagtggggtcaattaaaaggagtaaaggcagcagttccttatcgggactgctgtctttgttttagtgcgccctttggcaacgtgtgcctcggcatattgaagggttgttaatctcattaaggagtcggtttaagtacagggtgaggaccttgccgattaactcgatttaatcaatcacgaccacgaaaatgcttgggttggggaaccactctcgaatctttcacagagttattatcgcgcttggcttaacaatctgtcatatataaaactttaactctattctgccgatattattaatattatctggaaagaggggaatagaatgttagaaaatctcagcagctatcaaacttatatagctttcctaactcctgtgttaatcgtaattatttcagggactttgttattgcttacaaataagcatgaaagagttttattatctccaagaaaaaatctctatcgaataatagtgaagattagtgctttatccgcaattggaacagttattgctctattttttattttgcttggagatacctttcttagtgacagcacctttaaattcacattgccttatatcctttttgtttttgtggtgtactttgtcgtcatgtctttctttaatggatggattgaaaagagagaggcaatatatcactgggtttatcttgaaaaatataattatgaaccgctaatgatacataaagttacttttaataataaattgatgctaacatctgtaccttcacttactgatgatattcacgaagttggtcacatcgtcgttgaagatatttcaattttatacgatgtgaaggttcactttatagggcctaaagtttacagaaaaatcattttcaaacgacctaaactatcagatgttattaatgcaattcaagataagaacccacacaaaacggacgagtgatccacttttctctttaaagtgctaacgcctatctgattaattttaaatttaaaaacgttcatggatatttaattcaagaactgacacgtatctatgtggtctgcactcaacactctgaatactttcaaaatcggttactgaatatgcaccactcttgctaaacctgctttttaaataattatctgttccttaaatggcgaaatattaaatattaaggaggaaattggaatgatgaatgtaacaacgtttctaagcttgttaggtgcaacatctttaatcgccctatttggtataatgattaaatcttttgctatgattaagacatcaacatttgaaaagatcataatgaatgatcaacaaagaataactagaggagttctaatagtttcatatttaacattaattaatgctgttgcttttagtggctggatttactttttcagaaatcctttaaattggaattatattataattcagttttttattatgatatttttaggcataattattttcactagtataatgtacccttcaatagggaaaatgaagtataactattttttaaagttggaaaataggaagtactacattataaaaagcacttctactggggatattatattaagtacagacccaaaactttattcagagatacttttaataaagagagaagacttgtataataagacaatttctcaagagcgatctacttagttgtaggtcgtattttttattctaacaacaaaatattgaatatctaagcggattaaaaaaatttaatactaatattgaattgtaaagaatcgcaacatttaaaaactcagtagttcaaaacttctattactttctaaataataaacggagccgcttagtggtggtcttctctccacatgtaattgtattggaatatatccccatataattcaaccaaaataaaaaaacagcttgttaaggctgctagtattactatctctaccgttggagtctcaacctctgattatgacctcgttacaatgaacgagacaactaagataagcgcatatatccatataactgtaaattaatcacacaaccaggttattatgatacctggagaataaaggcatgttgtataatcgcttagtcatcaatacggatgtcttaccagcagccccgggagtagggactttgagtgcgaatacacgcatttcaatgaatgatacactagctcacgagattgttgggcactatgaggcttctattgcaggtaaatcgttcccactttataatcctcctcctgaagtcatcaaaagaaactatgctcttgatgaggctcaggcaagtatccgggcagcaaggtttgctcctgacctcaattctactgaacgatatgctttattgagagatgcgatggttagacttcgtaatgccgatctcagggtgcgagatgtcaaaggcgagctattcatagatcagagataaggtggtcacagaatggaagctaaaatgctgtttggcgttggcttagtcttcgatacacccgaattcggaaccatcgttatgggggctaatgaagaattggatgaactacttccttcaacaatcaaagagaggatcggtaaacagattatcatcaaaaaaacggatggggaagaacaaatattgaagttgtttctactcaaattaaccattctatagccggaaaaaaaatatcggtatatgtttgggtaaaagtatatccccagacgaaatacctgcgggttcaatcgtctactgttatccatgaggacaaattgacagtaggtatgctttgttgaagctacatggagtggcagttttttattgcactggctgtgtccatctttacttttaaagatcatatatgttccgaaagcatcggaaggtcatctgattccctttttgggatgaggatagcctttctttttatttctcaaaattgcggagaaagacatagactcaaacaaaggagagtttcctatgaacgatgatactacaaccgaaaagaagatcaccataactaaaggttctactcattccttgcatattcgttgtccctataaccctgcatatattcagcgcattcgccagattacgggcagaaagtgggaacccaaacagaaaatgtggatcataccctacactattgcggccatccaggagtttacgagccagtttgatccagatgaagttcagattaccccggagtaaagaaccgttacagaaggcactaaagttacgaggatatagtcgcaaaactatcaaagcgtattgtaatcaggtcgagcgttttctaagcagccttagccttaaaaataaggatgtcactacttccaatgttcagatgtattgtttaggtttgctggagcgaggaatttcccattcaagcgtgaatcagaccattagcgcgctccgcttctattgcaaacatgtgctccatcatcctacggatatccagtatattcgtcccaagaagcagaccaagcttccacaagtgatgtccgaaaaggaagttgcacaattactcaaatccgtaaccaaccctaaacataagccatattatttctgacctattcttccgggcttcgtgtaggtgaagttgtgcgtctgcgtggcagcgatctggatattgaaaggcagacactcattgtccgacagggaaagggtcaaaaggatcggagaacgcttctttcaagccttacctggtatggtgcagaaatacatagatgaatacagacccaatcgttggctgtttccggggcaatcttctgatcgacatcttactgagcggagcgtgcagaaggtttttgaagaagctagacaacgcgcaggaattgtgaaaaaggtaagtattcatgcgctaagacactccttcgccactcattgctggaaaacgggacagacctgcgctacattcaggagttacttggtcatacgagtgcacgtacaactcagcgatatacgcatgttagtacgaaaaatatccagcgtattcaaagcccgctggatcggatggattttagagattgaatgcttcaataaatctccctttttcaccaaattcttcttcgcaaatactacaccataggttatcatatacgtagttcacatatcatgcaggatgtgtggcatttgcgaagtacataaattagatgttataagcaatcggtgaaagacatacttattaagagcaactcaactagatttaattgaaagacggttatctaaaacatgtttttcagcaattacctatcatagtgtgaaagtatattttttcacactgcatatttgagaaagttgattgagttgataactcctatacgattatatccttcgagactaaataggatgttcctaaacttcttggagttacgtacacttgagcataaattgcaatcaaatttaaattttatactttaaataactaataaaggaacaggtgattaggtgctcgattttaaagaattaggaagaaatgggattgatttcgaacaacttataagggaattgttgttatcagaagattttgaaattcattggacgggagtaggtccagatggggacaaggatttgattgccattgagtcttgtgaaggtaaattgggagtaattcagaaaaagtgggttgtacaatgtaagcataatgcacatagtgataaatcagtcggtaaaaatgatcttcagattatggaaacttgtttagctattggagcagatggttttttaatagcatgttctacacaaccttcatcaggattaatcaatcatttgaaagatattaataatttcacaaaggttagcgctaaatgttgggatgcaattgaaatagaaagaaggctaatgaaacctcataactatcatttaattgatatgttttttaatgaatcagcaaaaaagctgtcttggaaattatataacacacaggattcttcgttttggatggcttactataagaaatattttatttatctatcgtcaagagcttcattgacatttagtgagattggtttagtggagaaatttatagaaatagtcgaaggctttgataagatcgataaacgtaaacttgttggtcttgaaagagccactactagtcgtgaatacttactgccaagagctgtatattacgatgacaagaatacaaattttttggtatttcttgattacatgtattacatcaatgagaaacctaaagctagactgatagattttgataaatattttaacgagaagaattggaacatagagggggtaagcgtcagttgggacataagatttgtagaagccaacttcgcatcagatcactttagcataaaccacaaagattattacaaaaacttcatggataatttcaaaattggatactcaagagatagtaatgaatttaacagattgtatgaagattatgattatattgagaaagcaataatgagcagtggattgaaagatatacttgataagcacgaacataaacaccattttaatatatttgaacaaaatatcgttgattgtcttaaaaacgctcctggtggaacttcatcaatcgaatcggttttgaattatgtgagaaagtgtcacgattttgatagtgaagatcgactaaatagtgtgtggcaaatattatacattgaggtcatacatgatttaattaatgaggacataattgttcctttccacgcttctccctatggagtaattactctaactgaaaagggacgacaatcatgtaattactatgaaagtatattgcgtagataaaataaaaatatattatattgggtttaatttcaatggaatatgtgaattgaaattgaattatgattacctgataggttggcttactggatttttttgtattttaatcttttagtaaatgttatacccctttcattgaagcgttgataaggaaagaataacgtgaatagtaagaatataaacctttcgaatttaatgaattggattcgcaaatgatctggatatttcaaagaagccaccgacatcttataacataatattcacgctgcgggcatacgcccttggtccggcattcgccagacactcgacatacgtcgagtcgtgaatacgggaacgttatcagaaagatcagcaaatctattttaaacattgaaggagcactatatggcgactatagcactgataaggcatggtagcaccagatggaataaagaaggacgagcacagggtaactctgatatttcgctggatcaggatgggattaatcaagcagaacttttagcaacgagattaagatcagaagattggaatcatatttattcaagtactttagcaagagcaaagcaaactgctcttattgtagggagtgctatcggagtagatattcaccttgatgatcgtcttcgggaaaggtccggaggattgattgaaggtactactgaagaggaacgaatagaaaagtggggaacaggttggaaagaattagatcttggacttgaaccaattgagatagtccaaaagagaggtgaagaatttttagaagaaataatgatgaagcatcaaggtgaaaaggtgttggtggtttctcatagtgccttaattcaatttaactttatcaatttagttcctgattttcctacaaaacattttggcaatacatcaataactattttaaagaaaatagataatcaatggacatgtgaactgcataactgtacaaaacatcttgagggtaatatcaaagaaggctgatccatctgataacaccatattcaagctttggagcattcgcccctcggtccggcagaagttagaagcatattcggggatggatgttcagtagcgaggaagcggaatcagccggacacatccaatcgactaagtgcgctgacgcgcacccggcagcttcgctgccttaagtagataggacgtcgagaatacccgaacgttatcggaaatatccgcacctgaaaatttctgatttataatcaaactaagcttatggaggaaaacgtatgaaacatgcatttagtttccccgaatacataagagaaagacttaagaattatgtgaataatgcaattttaaagacagtacctgaacaaaataaccaagaatcgcattacaccacgacattactaagtaatttacggggaactgtgataaatgataatcagtacaaaatagagttctctggagccaatatagatgacaggggaaagaactctgcagagtctaagtatggagccgacttatctatcgtagctgaaatagtggataaagataatccagcaaagagaataaagaaagcaattcttattcaagcaaaattgatgaaagaatcgaacagtaaattagaatcaaaaggattgaaagaacaaattgaaaaaatgaaaaaaataacgccgaaccctaaagtgatgaaaatagcacctgataaatatgatagaagtaagagaactgtaagtgtatgtagtggaaataaaatattacatgatgaaaagtacaaagagtatgatttagcagaatattttgtaaaacgtgtgattacaacatttgatggggatacgagacctgaatttgttgaaagagcattaagaagtgatctggaaatattaaaactttcagttgttaagaagtaagtactctatgttttcagttaattgaagttgtaatttgaatcgattagctttatcgaagaagtcggatacatcctataacataatattcacgctgcggcccctttggagccttggtctgctggatgaattttgtggaagcgtttcagcagacacatccgacttcgtcggacgtcttgaatacaggaatgttatacgacagaacggagagagataattatatgcagaatcaatttttcggagatgtaccagatctcaataaacatgatttaatattgtttttgtctaccagcttgtctattactaatattttatacatagctatgctcaatagggatagtgggaacaatcatgggagtaagttgatgtattacaattctaacgcaggagtgaacaatcataaattaattacttttttgaataattgtgttcttggaattaacggattctctagagatattaaccacttatctgtcttctaccgacaaatgaaaatatctttgcaaatactcaatagttattttgaaaaaataagacgaaatgattattttcatttagctgctcagtatctaaacaataacaagataatagtgcttgatcctgataatggtatggaggttatgcagagcaacagaaaacacctatattatctcgagttaaagtttctatttgattctatgtctgatgattccataattttaatataccaaacatactcacgtaagaatcgcaatcaaacagaaaatgatattaaaaatacaatatttataaacttatcagtgaatccaattattatatcgggatatagcaattttttcttcattgttatcacaaaagatcttgttatcaatagacaattgcggcaatcagtcttaccaaactatatacaacaaggcaattctgtaaagattatttgagtatatccaagttccgtcgtataacaacatattcacacatcgggcattcgccctcggccatcaggaggtatttcggggaagctggatcaggcgacaaccctgcactggcaagtccgtcggacccgcgctgtgcgcttaagccagtgaggggtcgtgaatacacaaacgttagacgaaactaattaataggagtgaagatatggggaaaataggggttttcgaggtgcgacatgcccttttagaaataattaaggaatttaaaaccattagttcagacgatttcaacgaacttgcgtatatctcagcgaccaataaaagtgaattatatcttcgagataagttagctatttattttcaaaagaattatccagaattgatagtatcgagagagtatttacataaaagcggtttacttgatgatacgaacgaaagatatgatattgcaattcttgagagggtaaacaatataaatgttgaaccagtattgataatagaattaaaaaattggtattgtcatgacgtaccaagcaagaaagtttggaatgcagtaattagtgatgaaatgagagtagatcttttatcagaaaaattgggccggctaattgacgttattcaaattataacgttcacacatattactaatagagtaactgatgatttacacaatggaattattaaatatcagtcatttattaatgacgatatacagaaggggaaaaagaagtatcctgatgagatagataagtatttcaacaattggattcaaaatgatgaaagagatttagtgaaaatacaaacaggaccaggtaaatatcagagaagagaaataaaaaattatttttatgtgatctcaaagaagaattagattcgtctaacataatattcaagctgcggctccttcggagcttttgtctgcgggagggatttcagcagacaacccctgtggggtttatgaacacaagtaagttatgtgtataatttttataaacaaggaggaagaaatgaaaaaagaaatcatagatcaatatgagaaattagcagccccaccaaaagatgctgatggaaattggtatagacaaagaggaagagaactagaagttcttgttcagaaacttctagatttagaaaagcttgaacctagaatgcgatatagacctgaaggagaagaaatcgatggttcctttctattaggggataaggtatatttgcttgaactaaagtggcatagtgtagaacttcctgcatcatctatatatcaatttaaggggaaagtagatgggaagcttttaggaactataggtattttcatttcattatcaggatatagcaaggatgctgttgacgcactgagtcttgggaaaaccttaaatgttattttatttgataaagaggactttgaagtttgtgtaaaagaagagtatggatttagaaaggtactaacgactaaattgagacaggctgctgaggaaggtatagttttcttcccgtataactcagtaagtatacaaaatgatttaaaggaaacgatagagcctactctacctcaagtattaagttatcaatctatttccggaagtattgtgagtgaaaatcagataaataagattaacactgacataatattaatatgcgaaggcaatagggatagagaaatattgttaggacttatgaaaaaaattataaaagataaacctattaaacgagtaactatagttgtcgccatggggaaatatgtaatgcctaaagttattaattcagtaaggtcacaggtagattctgatgcagatatcttagttattgttgattcagatggtgaaatagataaaactatgaaattctttatagaaaaggcacatttaaaacctaacaacattattattactgatccttatattgagacttggatatttaatgaattaccagatagaatatcagactatatgcagcgaaatgctcaacgatccaatcaaactgttgaacaatatatcaaaggtattgttgagtccattagaattgatgacttaatcaaaaaagataatagttttgagaaattctataattccatcgtgatcaaaaaatagtgcaatgtagttcaatgaagaaagaatacttcacataacataatattcacgctgtggatattcgtccttggtccggcatacgccggacaccagcatgtgctgggttgtgaatacaggaacgttagacgaaatcaacttaaaggagaataattatgaaactatcaagaattgaaattaaaaatttccgtagaattgagtatgttgacctgaattttaatacagcatcttttattattggcccgaacaatgtaggaaaaacttctgttattaaagcaatagaagctttactttcacttagtaatacaataaaggcagatgattttagagtgctttcggatgggcaaagagaaaaagaaattgagatttgtggatattttacagatattgaagcaagtactgcaaattcaagaggatttaagggtagggtaatagatgggcaatacatatataaaaaaacattcgatataggctcaactaaggcaagaatatggactctacagtatctctacacaatcaaagaagaatacgagaatgtaagtaagtggaaagatttgatagaacttggtttcagtgaagaaacattgacagacctatttggatcaaaaccctcaaatggaaagctttcatcaggatggcaattcattgtagaggatgctgttgtttggaattttgagtcggaacctgagtatatcgagaatccaggtgggatcgctagtaatgttgcttcgaaattaccacgattaattcacataccatcttatgcaaatgtcgatgatatagggaaagctgatggaaacaagacattactgggggagtgccttgggattttgtttgaagatttattgtctcaaaacgaattggctgctgcaattcaaggtcaactcactgaacttcaaacggttatgtctcctgacaatagtagttcattgataagtggattatgtgtagatgttaattcagttatagatgaagtgtttccgggttgtggaataaaaataagtccatcacttcaagatttgaacagtgtcttgaaaccaaaatatgaagttgaaatgttctctaatgtaaacacaagtgcggacaagcagggaacaggtttagtgagaactggtattttttcaatgcttcgttatcactcacacttaaaagctttgggagaggctaaaactagaccattattagttgcttttgaagaaccagaaatctatttgcatcctgcagcggcgaatcttttgagggatacaatttattctttgggtgagactgatcaaattatttgttcaactcattctccatggatgatagacttgtcaaaagattggttgagtttaaccaaactataccctgattctaacggttatactaggtcatttaactatggtttgaatgatgcttttgaggaactaggaactgacgaaaaggaattattgaagatggtcaaaacgtttgatgatgaattatcacgaattttctttgcagatagatgtgtcattgtagaaggggattccgaggtcattgctataaaaaatacattaaatctacttgatgctacaacacgaaaagatattctttcaaaaacacaagttattaaagcaagaggaaaagctgcaataattccgttagtaaagtatctgaataagcttagcgttcctttatatgttatccatgatcgtgataaaggtgtggctggagctgaaaagttcaattcaccaattgcagcagctgtaggagattcagcatgtgtttctatgttgaaggaatgtttagaggagtgtctaggatatcaagcgcctagtagtgataaaccttttaaaactcatttagaaacaagcaaatggaaagcgaaaagtgatattcctgaatcttggagaatagttttccaaaaagctttcgaatgtagtatatagcattgaaaattatactgttaaaaattgataaaaagtattcttgagaagcgttgacttcagataacataaaattcaagaattcgctcagttggagtgttggtctgctgaaaggattctcattaggcatttcagcagacaatctcttcgaggttcataaatacaggaacgttgtacgacacaactgaaaggagaggtagtaaatgaaatttgcagagacagtgtctgaatttctgtttcttaaagatggagagaatgctccaaggccaaaaggttactacaaagatctgataatttttagcgaatatctaaagtctattgatgtaactgataacaacataaatgagttttttaaggggatagatacagacacgattattaaaagcgttgattattatataaatcgaaatagtatcaagaaaatgtcaacagttcagagatacgtttcagcagtgaaagagtatctcctatatattattactgcgggttatgtgagcaatgatagttttttacaacaattaggagcaccagcatacaccgaagaatcatttagaaataaggttaacgtgtatttggctgataatactttgcttgataaatctacatcctatgatcccttaacttatgatgaggtgcaaatcttgattcaagagtgcgatctagttttaaacatctctattgctaaaataacaagaagtaaagaaatgaatatggtaacggcagcgttgataattaaactaattctactaacaggtattccctatagagaaatcataaaaatatcacaaacatcatataataataaatttggctctttttgtattaatgaaatatctattagattgcctaaaggattaatagaacaattaaacaattacataaagctgagagaaacggtagcccatgtgaacgaattattcgtaacatatgatggacaagcattaccaactaatacatctcaagttgtgtattggttgaaaggattatctggtagacaagatttaacgggaatcataaagttcgcgattgtccaaatgttgaaacttgatgttaatcaagttatcatcgaaaaattcacaaaagttggattgaagatcattcagtcatgcaaagaacaatttttacttgagcaagagttattaatagaagctgatttagatgcaaagttaaggagatcggaagtttttaatattttgtaggtatattcgtaacgtcggctacatcgtataacataatattcatgccacggatccttagtccgatggggaagttaggcaaacaatcctacatttcatgaataaaatctttatctggagaacttttgaaagcaaaatattcataaacatattataacgattaaaggtggaatgaatatgaaacatgggtttagtttcccggaagatattaaaaaagaacttaggaaatatatagataaagcaattttaaatactatacctgaacaaaattatcaggaatcacactatacctcaactttgttaggtaatttaagaggtactgttgtagataatgataaatataagatagagttttttggagttaatgtagatgatcgtggaagaaattctgctgaatctcaatatggagcagacttaactattgtagctgaaatagttgatagagataatccagctcaaaaaataagaaaggcaattctcatccaagcaaagttgatgaaagaaccgggccagaagttagagacaaaaagattaaaagagcaaattaaaaaaatgaaaaagataacaccaaatcctaaagtgatgaaaatagaacctgatattaacgatatcacaaagagaaaggtaagtatgtgtagtggtactaaaatattgaatgatgaaaaatacaaagagtacgacttaacagattattttgtagaacgtgtgataacaacatttgatggtgataccaggccaaaagtggtagaaagagctttaagaagcaacttacaaaaaattcaactttcagttgttaaaaaatatgatagtttttaatttatttgtttcaattaacttgaattagatgtactgaagagtgttaaaggtaacgcttgatgaatcaacgtaaattatgcaatatcttaaaatacttaaatagaggaatgaaataatattaagaatatattggatattgatatggacacctttaggtgagattgtacattaaataactgaagatgactgtttagatgacaaagactataagctgtggagtgaagagatagatttcagagaaggaattttactaagcaatcttagcagaatcgttaattaatcataacgaagcattcttcatttgggatgaattgatttcttcatatgtgcctttcaatgttactcacatagattctcattaagatacttggatggttgatagtggttagtttatttaatgaaatagatcataaatcatcctaaatttgataggcgagaaattctagatcgaaggaaagtgtatatgagaaattattttggcatatgcaacggtttgtggctggaagacacagattttatctaacatgaaatgtctgtatcgtcgtgtatgctccttggtaggcaagaaggagttgtagtctattcaatcgatgccttcaactaagtctgacctgcagaagagtcgttacaacaaattgaatattggacaagctattgcaaaaattatgtaggaaggaggtattataaaaatggggacttttcatggtgaaaatctaccggaagtagctcgagagcatcagcaagaatggaaaagtataagaaaattcaaagaaatgatggaagatggaaggtttatagttagagaagaggggaaaatcgacttcggagtggatttaacactagaagtattgttaagtaaaaaatatgcgagcaattataaaattagtatacaaataaaagacaagctgaattcgaaagcaataaggaatcaagataaatctttttcatatcctttaccaattaaaacagtcaattatttgttgaatagtcctaattcaatagtagttctatactttgaggatagtgatagctttgtatgggaatggacagagattatcaaaaatgatgcatatagaaagggattgatttttgaggaaacaaagcaagaaacgtatacttatagattctataaaaatattgatgaagatatgaaaagagcgctacataaggaaataataacgagatccgaattgattaaatcaattagcaaaagagtgggattgaaagagttaggaaatgaaagtaatgatttaaatataagcattaactcggagtacacaaaaaaggctcttaaattgtatttaaataaaataagaaaaaaaggaatgttggaacaattaatgatagttacacattactcacctaaggacttaactgttggacttcaagagggaataattacttcacgtctagcggatgggattatggaaatagaagaaatagatttacaagtattgattggtgcgaggaaactctcaattatagaaagtttcgaattaaatgaataggggtgtaattcatgaaaaattatttgagtattaattatattgataaactaaccgaaagtataaagaaatctccagaggatttttttaagattgtttcaagaaattctaaagaatatgaaagtatgggtgagttagccgatgcatataatgcagttcataaagattattttatttctcaattaaatattatcaatttatttaacagcaaagattataataaactactctcaattgatctatccactagaagtggcttgaattataagactattacagaggtaggaaattacagagttactcaagtgacagatattaacgatgaaaatattctcacaagaagatatttcattttagatttcaccaatactttattcgaaaatgaggttgagattacaaatgagatatacgaaattgatatttatagtttctcaatattaataagtgaaataagctcagctaagcaagatatagaggataacattgacttagaagaagcagtaaagtatttatctcacttggaaagtatatttaagcgacttattgaaaagtatcatgaattaataaatttaaattttgaactagatagggatattaaataaaataagaagataatttgaaagggggaaccaagatgtggcttatagatgaagaagttttactgaatcaaacttggaatgaactctttagtttgattgattcgacggaaggtaaagttattggagaattaaaattgtttgatttggtataccttactgaaatcgacaataagtttgtgggcaacggagtgtatataattaaaatgaaaatggtatcaggtacataggaaaagcatcatccagaccatttgtagagagaataggaggacatttagatttaagaaagataggcagtttcaataacttattaaagagtattgtaaagaaagacttaatgaaagctgtatgcgatcaaagtattgccgaggcaggtagaattctgatgaactataagttaattttaatctgtatgagaggagaaaaaggaaacgggagtcaatttaagatactagagaatatcctaatacataaatatagaaatacaaatatgttgaataaccataataaaatgagaactgcatatcacgaaagtgaaaagataaaggatactgtatattcgttataaagagtaatatctaatacctaaaaagtaactaataataactaatccagaatttttttatacttcgagaagcagatgctaatccagaatgaagatcgttatagaaatatgtgtatgcaattaactatgttgtatctggaggataatcaaatggcaggaacaataattgaacaaataattaaagaggtcgtggaagatcagataattaggaacccagagtatggaccgttattaataaacttactaagggatttaaggaatggaaaatatcctgaagatatactaaatgctgtagttcaaaaacctagaaatatggatttagatatctatgacgcttattgttttctacaagtttggtcagatctattctcaggaaaaattgcttcagcaaaaattattacaggaattggcccaaagaaagatgcagatattgaaggcaacaacgcaatactatctaaactcacttatccttttaaagcagaattcttcccttcaaaaaatggtaacgacggttatttcgaatggcttgaaccaattaagttcattacaaataatattttactaaataaagatgatcaagtgcaggaaacccaagtagacgttaagcatataccattagaactaggttatacctcagcctataaaacttatcaatatatgacttctgaaggcggagcagtcgcgagatatccctatcattctgatcatatttatatttttttcaatgtggactatgaaaaagactactcaaaaagactagaagaaatgtataaggtataaattcatttaaagtcattcagacagacattgattggctgataagattttgttaagccatatgttttggctacttacttatgatttattttgaagtctaaagtacgtttacaatgaatttaaggagttttaatgattatggagcagttagaacaaataatagaccactatattgaaaatcaagaagacaaaattgctgagaacataacatttctgcaggataacgtaattgataaaactagcagtgagattgctgcgttaattgcaacaattaagccagatgaaaagggaggaattgttgcgatttcgggattctattatcaatttctagttgcaattgagtacatgttagacatgcttaaggacaaatgggattacatttttatagagcatctcgatgacatagttgttggaaaagataatactgtaaggttcattcaagtgaagactagtgagaatgtaaaagtggaagccactaatactcctgcatccggtttgtattatcgttcaaccatatcgggaaggaaagaaagaaaaaataacagttggattgacaaattgttatcaaaggcggaacttctccaacaaaaagatgggtataacactcaattccagttatattcgagctatcatttcataaaaactaaaggtcataatttcgatttatatacaggaaactccaattatgatatggacattgaggatactgatcatttgcttttaaaagttagtgattccgtttgtgataaaaatggtgaatcttatgactatgaaatcaaatgcggagaaaaacccaaagaacttttaaggagattctatctgcatactggtacgggattacagaatttagaggtctttgagaatcatttgtgtatgaggcttagcgagtggttatttcgtgatatcggggatagggtcatggttcaccccaatgacctgaatactttaattggtcatttatgcacgagatgtacatatagagatagtgcggaaagattgctcattaccaaggacaaattgggtgatattttgagcgaaattagaacaagatgcctaacttctgttgagcagactactgagaagcacggtaatatgtctaccgtttgtagaattattgattctattgtcagtgatattgagacttgtgctcatgcttctacattcaaagataaattatatacctatcgtgaatatcttaaacaatggattgataaaggagggaacatccgatctctgattgagcgatatgtggacggtaccattaaaagctcagcttatgccaacttaaaagaggtaaacagggaacaaaaattatatgattttttcaatatggtattcattatgatgattgtcaaagactcctttttggaatttactgattcgaatagtttaataactaagaaatgcacggtttctaatctattattttcatttttaggtttggaatcaagaagtaatttagaaacaggtctacagaaacttgaatcaataatacagcaatctgacacgaatgatcatctttatctgttggataaatcgctaagaattgttttccaaaactatacagacagagggtttaaggaaacccttcgtcatgaaattaaaagcttctcggagattcagctgaaaggatttgaagatgagcagccacttaataaagtaacgtatatggttgacatcattccagggaaagaaattagggatgactttttggaagttttagacgaccaagattgttttcgagataaaatgcaagaaatttgggataagtattgcaacgaggtgagttgatggatatttttaacgctactcataataggctaattaaaaatggttttgaagcatacgacatagaagaaattaggaaattaggagtctcattctataagtcttctgtaaataatgtggtgttaaaaaagctgcattataacgaagaaataggctcgataaaatcattctccaatgaaataagatctattttgatggaaagtagggaaaatatctggaatacttatttattattctgtataggtaatgaaattgattttgaaacaaactataagattgaacgtgatactaattcgctgcgtaaatatgccatatgcagtgaattagacttagatcgaatcccctttttggacaaatatagagtgataaagaaaccaattaaaaacgatgtaactctggaggaggaaagtgagtacctacaagaaatcattctttttctacaagaaagcgatgggaagcagaataaattgactgcagatcagttggatgagttgatgaaaaaaatattaaaaatggtggagctgcgctatgaaaatagacaaaataacccttaaaaattttaggaactattacggagaagtttcttttgatttgacgagaaaaataactattttgcatggagataatgggtttggaaaaagctcttttttcgatgctattgaatggtgctttactagtaagatttcacgcatgaatggctcggatgcggaaataaaaagtgatatttttaataaacgttgtcaagcccgagaaaatgcggttttatcggtttgtattgaatttgaaggaaacatattaacccgttggttcaatgtcactggaagtgatctcggaattgaatatgggaaaacacaagttactctgagcagcagtgatggagaattctatcgtgggcaagtggacgttgaaacattcttgaagcaaggaacactagatgagacaagctttgtacgtggtacttatggacagcttattaagcaaacatttattttgtctcaaagtcaagtcgcggattttgttacatcagaagatccttctgaacgattcagagcgctggcggatattatgggattcagggctttactaaatgagtccgataatatgaagaaaatacacacgtctttgatcaagcaatctgagattataagtaatcaaattacctcacaggagaattcaattaagggaaaggaggaggtgaagaaggaagtcgatatttttgaatttaataagaaactactcgacattggttttaaagagcttaatagtaatataaatactcaaattaatgaatctcacaagcaggcactttctgataaggttaatgccgaaaagtttatagagctttacgaagagataaatttagagcgtttcgaaacagtgagtattattgtaaatcaaatctccgagaaagaatcaattcataatgatttgaggacccgaggggaagaagtaaaagaattattgaagagaataaacctgagaactaattctcttataaaagaaaaggagaatattcaaaagtacaatcaaacgcgaaaaaccattcaagaaaaggaactagagttagcctcatatgacatgaattccgtggacttagataaagtcagggagaatcttagtgttctaagaaagaaggcctcttccatagagtttatcctgtctttccagcctacaatagcgcaaaatttagaccaacaaaaaaacctacctgttaacagggagatttctataaaaaaagaagcaactcttaggaaaagaaaagaaaagttggttaatttgaaagagaagctatcactggttatacaagaaaataaagataatttacttcttcaacttatcgcaaatataaaagatataaaaggttatgtagctttaaataacttggagagatgtccagtatgctcctctatccctgaagaaaacttggagacttgcattaatcataacattctttcatatacaacaaagttagaagaggatacttcttatgttagtaaagctatctcattaagaagcaaggtctcgaacaagttggataaaacggatgagagaatcaacgaaacgaacaataacatcacaaaaatgaatttagaattagaacgtttaaaagaggaattcaacgcctacagaactaacgatttgttttctgaggaactgagtcaagctgcggattctgatttaaaagataagttaagcaaggcaagagtaaaaataatcttgcagcaaaaaatcattgaattgaaaatttctcttgaaaaattaaaagatgaattgaaagatcttggaaatgaaggttctttaaagataataaaaacggagaacgaggtagtgcagtcgattgaacgaatgaaaagggcgagcggcagagtagtaaagcatcaggatcaaatagagagcaatattcaacagctgtattctgaaattcaggatgaccaaattattttaaagcgtctacgtccatttttaaagccggaacagtacgatattccatttaaatctttgatttccgaaaataaagatttgatttctaataatgaacggaagataagcagattgtcagatgtaagtcaagtgcaatacacaattaaacataatcaggaaattcaaaaccaaattcaagaagtcaaaaaaacaatcggaaatcttgataccaagaaaagtgaaattgatcagattgctgattctctaaagaaatatattatgcaattatttgatttctttgattcggacacaagagattatttgaacgacaacaattcacctatacaaaagtattacaggtatctgaatccacttccatctaacaatctgattaagttcgacggagcagatgaaaaattgtctataaaagttgtctttgaaaatggttttgaagaaagtaatgctcaaaatatactgagttctgggcaactaaatgtattggccatctctatttttttggcaattaatgaagctcaaaacatcaatgctctcgacttcattgccattgatgaccctattcaaaatatggatgatgtcaatcagtattccatttgtgatgtgttaggccagcttgataagcagattatcttttctacacatgacttaaattttgtgaaattatttttgaaaaagaatgaacataaaaaagatgatatacaagttttcagttttacaagtccgttccttgttcaaaataaaattcagcatattctttacgaatgataaaataaaaaaatcttatcttacaaatcataaaaatagtgttcatgaaccagtcgtttggaattggagttacacgattacattaaatgatttaatatgtatcgcattcacaaagctcaggctttatgagttgaattctataaccatgttactcttgaaaacaatttaggatgtaaacgttagatgaattcacatttctaaataatttgtgagagccaaatctttgaggtagattcctcattgctcgttcgtttacatatatttttttcagaaggatatccgatgccaagtaatctaatcaatgtttttagattttaattcgatatccgcattataacgatcatattttctcttacaatttgggtgagacgagaaatgaacttcctgtggaatagtaatcgcagctcacgtctagcattaataagacattgcagtttagacccatcagagaggtggatgtatgagccggttgcttgacttattggaagaggaacggcgcaagcttaaccagcttggagaggcatccttgaagcaagcgattccgttgtgggacaatcccgaggttcaggaacagagccaaagagtagatgaactggtggcacgagttagtgaaatgaaggtgagacatgaccgaatggtatgatgatgagcgaggtacataatgcgtaggggaggagaaacaatgaattttccaccgtggttggaacaagcgattcaggtaaggctggatgaggtgtctgcccgaatcgagcatgaccctgtattgagccgtgtacgtgaggaaaaggacgaaggattgtttgctggcaaggatatcgagcaaacacctgaatatgctgagtgggagagccgatacattgtcagtaaaggcatagagaatgagcggttgtatatgcaagggctgagggatgggattcagcttacagtatccttactgggccagtcgatgtttgaggagacaaaaataaaggctgatcaaaccattaacgcgaacccataagtcagggggagcgaccccgatcttaactaaaaaaagcagccgaagcggtaagtcacacgcttcggctgcttttttaacgctttacttttccaaaatacaattcttacttcgcacttaccgatttaaaccactcattcacttcttgcgtgatttgatctccgccattggatttccagttggcgacgaattggtcaaaggcatcaattggcagattgccgtagatgattttgttgaaggtttccatctcggactgacggagcaggttccatttggataccatggttggtgttgcagcgccagtgaaatagttttgtttacggacgtcgatctgggacataacgactttacctgcataccagttttccggtttacggaattcggccatttgtttctcgtaaggtgtctcaggcttctcgccgttggccagcttcacgagtgttttcatgtacagatccggaatacgtgccgggccggtcaggaaagggaattcgttggagaagtctttgatcttctctttgtcactggtcggttgtccgtcaatgatatcccagtcgtaaccttttgcgaagccgtattcatactcactgcccgtagccgggttagccaggttatcgagcaagtagttgtagtaaaggaaaatggcttctggatgcttcgcatccttgttgatcatgatacttgcgttgacaccagagttctgccacttcgtaccgatcttgccgtctgggccagctggaacagggtaagctttatactttgatccaggtacgttcttcagcaggtcaggggcaggccagtccggtacccagtttgcgccaggcagaatgcccgctttgccagctgtccagctttcagcggatttgccttcgtcccacagagcggagtcagcgtggatataacctttatccatccattcagccagcttagcaagggcttgtttcgcacccgggttaacggagccgtactcgagattgccatttgcgtctttgttccattgctcttcgattgtgccgtatgcaccgaacaaccagtcgagctgacccatccaggtgttggtgttgtttttcaacgagattgccagagggaatactttgtctggagacagaccgtccgggttctcgtttttgaatttgtccatgatgttctcaaggtctgcgatggttttcggagcttccaggttcagcttctccatccagtcctcgcggagccagagcagtgtatcgtcgttatcggtgtactccatgatcggcatgttgtatttcttgccgtccttggtgaacggataccacagttcaggatgtgctgctgcgtgatctttcagggtctgactcgcgtacttgtcgaacaactcatcgatggcgatgaattgaccggagtcgatcagctgattcgtcagtaccgcattggtgggtacggtaacgaaatcaggcagtttctcgccagaggcgattgccagttgcagcttttgtctgtattgatcgtcattggccggataccaagtatctttatgtttcatacccagcgtttcgagcatccagcgatcgtgcacgttattttctttggtatctccttgcacgtatttcttcggcattaataccgaactgaactcgatgggtggatcatattttcctttagcaaaagcagcttctgcttcagctgagccgacagttcccggcgtattaataccattgtcactgcctgtctcgccactgccgcacgcagtgatcgtgatgagcgcgataaccatgagcagtgaccaccatgtttttttgaatttgatcattgttcaatccccctacggtgtatgatctttataaatgcgtgttcaaaaaggccggttttcagtaccgagaagatgggatgaagctagaaatggagtagcggagcgtagatagagctacgtgagcaacggacatttcggctgaatcctatattcgatgctgatgatgccgctaggcatccttcgtaatcaaaagcggactttttgaacaacctctacaatgtaactgtaccaatttgggcgggagggcatctatatgagttttttagttttgataggactctattagtgaatgttcaaaaagagcggttttcagtcattttatttgtgctggtctctgtattcttgcggcgtaacgccgaactggcgcttgaacactttgataaaataagctgggtccatataaccaatctccatgctgatttcatacacttttttgttggtcgtgaccagcttgtggcaggcccgatccatacgcaggcgcgagatataatcactgatgccttcgcccgtttcgatcttatagatcttggacaaatgggtcggatgcagattaacatggtcagcgagtacacgcaaagacacatccagatgcaggttcttatctgtaaaatcctgaatcttcttcacatactcggaacggatgtccttgatctcgttggacgtgccttccttgagtttgccaagcacactgagcgaccatttccgcaatttgctgatggtggcgaaaacttccccactttgcaaatcctcgacatcatctcccattaaagtggtcagagtcagcttgttccgatgggcgatgttagtgaacgaagccgtaatgagaaaaccagcctccatgcaatgctcccatgattccgaccatttttcatccagctcagcgcagaccgcgcgtattttctcttccgctgcatcccattgtccgctctctagcaaactaataaaggtgggcggggtgtacagtacatccaaaggaccttgtgccgcaggtgtctcgacatcgctgacgcgcatgacaaattcgcgttcgtcgccgacgatctgccggaaataggcggaagcctgacggaagcgatcgtaaagctgatccggaaaggtgaaccactcggtgataacgatggagagggagcctttcagaaactgttttactttggattgaagctgaatggatagcttctccagaatggtttctttgccaatatcgcctttccgttctttcaactgaagtaaaaacaccagatatccgtgctcctccttgacgccccacacttccataaactcacccataatctcttccgccatattgatgatcgcatattcgatcagggtctgatcattgctgtcatagtgtccgaattcttcttccaaacgaaccaacattaacgcggcatccccggtatgaaagggcagagcgtaattggcgagcttccgatcccattccgcagcggcgattcgttgtccctgtaaagctcctaggagcagtcgtccccgcaaatgggggagattctctcgcaacgtaaactgcgttcgtgtcagtgaactgacaagttcccattcgttgttcaattgatcgatggccttctgaacggcccccattaattcatcatctgtcggcggcttcagcagatagtctacagcctcgaactggatggcttttttggcgtaatcaaattcggaatacccggataacagaatacattttatttttttgtcccggatgcggatacgttcaatcagttcaatacctgtcatttcgggcatctgaatgtctgagatcacgatatcgatggggtgagtgtcgatcatttgtagtgcttcgtgtgccgagtatgctttatgcacatgttcgatccccagtgtgtgccatggcttggtcatggacaggttatcgacccagtgtgcttcatcgtctacgatcatcatgtgcattataatgtctcccttggtggttgaactaaggcatatttacacttgccactccgatgacagaacaaccttccgatcgctgttcaagccccattttctgacttagatgattataaggttaaaatggtgcttgaaaggcgaacgctttgcttcttcaggttttttctgtcctctacgttcacgtgtaaatggttcgttcaaaatcaaatagtcaacgtatattatcggtattacctttatcggaatctgtatcctcttttggtatctcccagatgatttcggttcggaatccgcctagtggggatgggccgaataggaggtaggagtgactgccgaacaggtgcgtgattcgttggtgcgtattccaaaggccgcagcccatttcttcttgtaaaggttcctgcattttcaagttgagtgcttcgtattgttccgagctcaagccagggccatcgtcgtcgatgtatattctgccaaaaccattcttgcgctccccggtaattcggatttccccggatgaataggacttcgccacgccgtgtatgacggaattctcaaccatgggttgaagcattaatctcggcactgattgggcaagcatatcctcagggatatcgatgtgatactcaatgcgaccattgcgcagcttctggatatccagatagttgatcaacagcttaatctcttcttgtagcgacgacgtctcccgttccatacgggtggtgtagcgataatacgcacttaggttatgcgccatggagaccacggcttgctcgtccttcatctgggccatgttgatgatataaccaagacaattatataggaaatgcggattaatctgcgcttgtaattgcttcagcgtagcttcccgggctctaattttctcatggaatacattctcgatcagatcttgaatctgatgggacatatcgttgaatcggcggaacaggaatgagaactcattctggtttttgctatacagtcggacagaataatccccttgctctacacggcgtaaacctttgatcagttttttgatcggatattgcacatttcggtacagcaggattgaagcagagatgcccacaaccagcagcaaaatcatacaggtgtagaacagattctgactcagcgagatgggtttcaaaatctgatacagcgggatcacgtccaccagatgccaatccagataagtggacttcacggagctaaccagatagttcttcccgttcagctctacgacatcctgtgtagtatcttccggagaatgcgtgtccagatactgaatgagttctgcggacaactgcttgtccgcgctgcgattcagaatgggtgaatttcctttgtgatacaagaaagggtcgccttgtccgcccgctttatacgtatccagcatattttgaatgttctcataactgaagctggcttcaatcaccagattacttcccgtgagcatccccggctgtgccaaggaatcggtatagaaccaatagaaggagttaagttcgtcctgtgatgcggaaccctgatccccataggtccatcgtccactcatattttttttcaaatactcttcatcatatcctgtcgtttggttatagttggcgatgacatccttattctgctgtgaatgcaccgcatatcgggtgggccatatatccgtaacgccggtttgcagcgtcatcttctcttgtatcacataacgggtctgcatccggtcatatcgatcatcccacatgttaaggccgttgaatgctctgacattgggatctcgggagagaatcaggctgaaatccatcatctggttgatgcgggagtcgatctgactggacagaaacgtgagctgtttcgtgttggagatctgcagttctttgctgacgacatcataggtgacgttattcgagtaggtgtacatgattagaatggggatgaacaagaccacaattaacaagtttattttggcaaaaagactgaatggggatctggttttaccttgaaaaggcattaagcgcttccatatatacatgaaaagtctccttctaattcgtgtgtaaactacctcttctgatgataccctaacaaaacactatcaagcctaacaatgttatatagcagacctcagaatggcttgatactatttatatcagagaacccgatcacacacaaaaactttttttgggaacaggagaagcgctatggaggctaaattggagggtaagcggatcccgcaggcaaacgttgggaacaagctggataaaaagagaaaaaaacgctacaaacagccatggattctgcactttatggtgttgccggcggccattatggtctttatattttcatacattccgatgtccgggattttgatggcatttcaagattataaacctgcactgggatttttcaattccgaatgggtaggactgaagcacttcaggtacatgtgggaaaatgattatttcctgcaaattacgtggaacacgttgttctttgcctgttccaagattgtcatgaatctgatcattccgtttgtcttcgccttattgctaaacgaggtacggaagatggcgctgaaaagaacgattcaaacgctcgtgtatctaccacactttctgtcatgggtaacgttatccggtatcctgatcgatattctggcccagacgggtattgtcaatcagttcctggtctcggtattcggcatcaagccgatcttcttcctgggggatggcagctggttccgattcacaattattgcgagtgatgtctggaaagagtttggattcaacacgatcatcttcctcgcggcactgtctggcattaaccctgcactttatgaagcagctgaagtagatggggcaggacgctggaaacaaacgatgtatattaccatcccggcactgattcccattgggatcgtaatcgcaaccttggcactgggtaatgtgcttaacgccaactttgaccagatctttaacttatatagtccattgatttaccaacaaggagatattatcgatacgtttgtgtatagagaaggtctgcttagtgggcagttcagtttcgctaccgctgtgaatctgttcaaatcggtcatcagcctgatcctgattgtgatctcgtaccgactggcttaccgattcgccggatatcgaattttctagaaaggatgacaaacgaatgtaccataaaacgatgccttaccgcatattcagcatattcaacaatgtgttactgaccatcctttcactgctctgcttgctgcctttgtatcacttgctcatggtatcacttagcgcatctgcacctgcaaatgctggtctcgtaacgttctggccaattggatttacactggaggcgtatgccaagacgtttgccaataccaatttcctctcttccttatgggtatctgtggagcggacggtacttggtactggacttgcgttaatcgtcaacacgattgcagcttatgcgctttccaaagagacgcgggtgttccgcgcacgtaacatctatctgtggtattttgtcatcacgatgctgttcagcggtggcctcattccagggtacatcctgattctgaagctgggactgatgaacacattgctggccttgatcctgccaggattggttgcggtgtttaacattatcttgctgctgaatttcttccgtaccgttccgaaggatctggaagaagcggcatttatcgatggcgcagggcactttaagacgtttatcaaaatctatctgcctgtctccgtacctgttattgcaacggtttcgctcttcatgatggttgggcattggaacgcatactttgacgggattatctacatccgtgatgcggagaagctgccactcgcgacattcatgcagacgatcatcgtgcaggccgatatgtcgaagcttgatccagaagcggtgaagaacctgtcgcaacggaccattcgggcttcgcagatctttatcagcgcgctgccgatcctgcttgtgtatccgttcctgcaacggtactttgttactgggatcgtggttggtgctgttaaggagtagttgaatgtaggaaatgaataggattgtaaaatggagtcactgaactggggaaggccagggaggtggcttcttttttgtgtatggataaagaaggttgcatatatgtagtgtattacctttatttgaataaaatggtacgatgatagctgattgaaagttatctttattattcatatcagagggtgtgtacgaagtgaaaaaaatgataatcgttactcttgctttgtcgttagtaagcgcttctcttgcttttgcagcgacaagcgcaccacagaagataagtatatttttgaatggaaaagaactaaagaccagggcagggacagaagtcaaaataattgacaatcatgcttatatcccggccagtgttcttcgtgatgcaagatttgcggtagagtataagaactccaatcttaatctagtgaatagctattctcattacactaaaaatttaatagagatgcatctttccaatcatgaatttacaagcaaattcaacaagatcgagcaagaagtggttgatgttcttagtaaagtgatattagaagagcaagttgacatctccagattacaacagttaataaaggaagccgaatttaagggctggatccgtccagaggtatttactccagtacaagactataattcctttgatttttctgatgcgggttatagtgtggaggcatataaaaaagcaagtattgagttaatagcctatgttaataccggggacaaggaaagattaaagtctttccacgaagagagaaaaaaggcgcttgagtattacgattcttacacatatatgtatgatcgtatttttaaattgagctatattagtgcaacaaaataggaagagaatagtaatgatgatgagtgcgggagggaattcaaaatggaatttagaagaataacttgggataattttatcgaatgtattgaacttaaagtcactccagatcaacaaagattcatatcctcgaaccaacatgcacttgctgaagcgtacgtggcctcagatgaggggcagattattattacttttgcagtctataaggaagacaatatggtaggttttatttcgatgtactatgatgacggggatggcaattttgaatatagcagttatggcatcttcaagatgatgattgaccagcgataccaaggtaagggatatggtaaagaaatggtagtaaaagcaattgagtatgcgaggacatttccacgaggaaaagccaaagttgtagaactcacctacaaacctgaaaatgtcgttgcgaagaaaatttatgattcccttggttttattcaaaccggtgaaatattggcatgtggtgaagtacaggcggtattaactttgtaattgtccgttacagctccaatcctgctcttttttcatgaaatatacaccttgatttgggctattcaaatcacctattcccgaatcgagctatttcaaattcagagaggatgaatacgaagatggatcacaacttgatacaagcaatagtcaggggagaaacttcgctaggcattgaatttggatccacacgaatcaaagctgtactcatggatcaccattttaataccatctgttccagcagttatgagtgggaaaatcaattgattggcggttactggacttaccatatggatgaaatgattcatgggttgcaacaaacttatcatcaattaaagcaagagattgaaaaaaattatggtgtaacgatacaaaaaattggctcaatcggatgttctgctatgatgcagggttatattgcacttgatcaaaatggggagttattggttccgtttcgtacatggcgtaatgccacaacggggaaggctgcatcagagctaaccgagaaattacagtttaaaattccagagcgctggagcatcgcacatttgtatcaagcgattttgaacggagaagagcatgttacgaacatcaattatattacgacgttatcgggttacatacatcggctgttaactggcagtaaagctattggtataggggatgcctcaggtatgttcccaattgatgaatccacactggaataccatgaagatatgttgaagaagtttgacgatataattgccgacaaaggctacacgtggaatcttaaagatattttacctaaagtgtacactgccggtgaacatgccggatatcttagtgaagctggtgcccgactgttagatccatcaggtaatctggaatccaatattccactttgccctccggaaggcgatgctggaacaggcatggttgctacgaatagcgtccaaaaacgtacgggtaacatttccgtaggtacatcgatttttgccatgattgtattagataaaaacctatctacggtataccctgagattgacatcgtgactacactgatggcaatcctgtggctatggttcttgcgaataactgctccagcgatattaatgcctgggtcgacttgttccgtgagttttatgaggcgatgggacagaagcccgatatgaaccagttattcagtgtgttgttcaatgaagcactgaaagctgacgctgatggcggtggtttactgagctatggctactattcaggcgagaacattacaggaattgcaaaaggtcgtccgttgttcgtacgttctccagagagccgcttcaacctggcaaactttatgagagtccatctgtttgctgcgtttgctgcactaaggctcgggctggatattctcacacagaaggagcacgtaacgattgagcacatttgggcgcatggcggattgttcaaaaccccacgagtcgctcaaaaaatgtgcgcatccgcactgaatattcccgtgtcggtcatgtctaccgctggtgaaggtggcgcatggggaatggctattttggcttcctacatggttaataagcagcagcacgagggtttggcggagtaccttactaccaaggtgtttattgatgcagaaggacaagaggtttctccaaatagcgcggatgtgcatggatttgccttgttcatggagcgttacacggaaggagtggccattgagcagtcagcggtagatcatttcgtggagaatgggaagaaagcctgagatgtaatcatatttcttgaacagaggaaattggaacgaagcccgttgcctacactatgatgccctgttataatttcgatatatctatcgtattgggggttatgacgtggcaatatggataatgccggattgctcgttcgctagaaagccttacgcaaagcctgaataggggcggactttgtgtagggcgcgacaaaaatgagattgtttgccctggaatcaacatcaacataatgttacatcccgcaggctttgcaccttatttgttcttccaataaaaataaggggctgaacgccatgcaaacaccatttattcagaatcatcaatttaattatattcaaaaacaagctgatttcctgctcaaaacgctacgctcggttgtggatcccaaagtattggaaaccgtccgttatacggtcggcaccaatgcggtgagcatcttcgatgaactcacttcggagcagaagcaactgctggagcagttatccacgtatgagacgacacatgaattgcagacgtatctgaaccagctcgaatcatatctgattccatatccgcaagtatcagcgaagcagattcagaagctttttccaaaggccaagaagctcaaagtgcccgatctcgaatccatcgattacgcacacacaacctatctgagatggactgacattgcgacgagccgtttgttcatcgtgtacccgtacgaaggcagattcctcggtattgagggacggattacacctacgaacaaaaaggggtactgtatgttctgtcatcgtcatcaggagctcggattcttcaacgtgaagaccaaggctcattcgccggacaacttttcttccattgcccagtacgtatgcatggataacacagcttgcaaccatagtattacggatatctctatgttggagaagtttcttctctcgacagtaaaataatgcaagacacacaggcagggtcgctcttcggagcgacctttttgccgtgttcaagtatagtaatccgctattgaacgtaccacaaaacttcagaattcatattcgggtcacaccttttttctcatacgatcatggagtcggaatatcgttgacatagttcagtcccaagtgatgtgcatggttcagcagtgcctcataatgctcaggcttggattccaacgtttcatataaaaactcaaccctcgattgggacacgccgcagtaatcggcaatacccacattgagaaggttggcgatcgattgaccatagttgcgcttatgcatctgttcttccgtcacacccgaaagagagatccacaatatctgcttatgagagagcttgttcgcgccgtaggcaaatccgttgttcatgacacgatccacataacctttcaacatggctggcagatgccaccaccagagaggaaacacaaaagccacagcatcgtgtttcttcaatcgcttcatctcggtttcaacctcaggcgagaacacctgattttcttgggtatagtctggttcatccatctctcggagaattgggtcgaagccaattccatgcaaatccaatatctcataaccgtgaccggcatcggtaagaccctgtgcaaaacgttgagctacctgaaaggtcaaggagtcttttcttgggtgggatactacaacgagtacgttcatcttatctttcactacctttctggattgcagtcttgtagccataaatcagtggctgatgctattataaacaggtatgaaaacatctggaagtacgcactttgatgttctataggaagaatgaagtgccataggaacatcaaagtaccctaaatgaatgccttgaaatagatttgaataatggaaaaaatagcagaaaaaaagatcatgcttcaccttgatagcctatttatggaggggttcaaaaatgacagaacatggagaaacgagtgctccaaaaaaatataaagtaggcgtggaagcggccttggaagtaatgggtgggaagtggaagcctttgattatttatcatttgatgaccggacggaaacgcacgtcggagcttcggcggttaataccggacattacgcagaagatgctgacaacacagctcagaggacttgaaaaggatgagatcatacagcgcaaggtatattcagaggtacctcccaaagtggaatatgagttgacggactacggctggggactcaagcctgccctggaccatttgtgttattggggagaagagcatctggataaaattcacggagataagtttaaagttttggaggacttcgattctgaagagaagggggcgagaaattgaatggtgcggagcacgtgaaacaggtagtccctattcgttgtgaaggcgtggctgtagttctgttgaagaaaagcctcgatcaataccgtgtactgatgctaaagcgggctggtcgtatgttgcataacgagtggtgttatgttggcggcgggatagaaaagggcgagaaggcatgggaagctgcactcagagaagtccacgaggaaacaggtattacggaagtccggttgtattctgccaatcaattcgagcaatattattcatccatggaggagtatatctatattgctcccgtattcgtaggatatgtggatgaaagccagcctgtccagataaatcatgaacataccgagtaccaatggatgacgtttgacgaagccaaagaaaatgcggcattgcctgggattgataacattttggattttgttgaaaagcattttgccagaaaagccccttccgagtggcttcggattaatgaagagaataattaggaggtggaactcatcacatacaagacgatttatccaagagcatggttgagcctattatgtatgttggtcattgaagctatgtttttcagaaatattatttatgatgaaaatggtattatgaagtacttcctgatcgttatattgacctttattctcggttatatcgtttttctgctctggcgtttgtttttcactaaacccagtattacgctggaaagcgatcatgtgatttctatgaaacatcagagatatgatgcatctcagattgagtgtatttatatgaattacagacggattggcatcaaactctatggtaaacggttagtgccgatggatctatgtttttattttcaacgaggtcaggagtccgcaggcgtagaatcagtgtatgaatgggcggcgcgaaatgacaaagagatcaaacataaattttttcaaaccgtggggtagaacagtgtgtttgttgagtataaggaatcgttgaggaggtgcagcttaattctcgtcacaaattaaaaaggtctattcttcaatagtaaagtagattctataaatcagcaggagagatgcatatgaaatatctaacaaaagaatggtatgagctttgtcagcagacacatcttcattttggtttaagagtacataacggagcttacgagtcagatgaggatctatttttaaggctgtataaaagaaaggaaaaagcacatgtgaagcaggagcgagagcaatataacttggacccacgtttcatgctggagcatgatggtcaagtacttactcgcgtagacaaagctttcggtgaggaagaagtgactgaagaggatcagatcgtatttcacatgcctccggaagaacgagcgcatatagagaaactcattgcagagtatgatgtacgtcctccgtttgatgagaagaaatgtaaggaagagtacaaagaatcgatggagtggaattttcaatacaaggcggagaatttaccacaggaaatcgttgaacaaattgcggatatccgtgtatttacgttgggttattgcacgagagaagttatgctccagctgaataaacagagtgtagagaatagaagagaaatggaacgcatatcgaaagaatttagagaagtgatgatggcacaggatattacagatgaaatacatgggcggattcaataccatgattgtacagtgacagaactgctgacgggtggtgaggtggtcattcgttttgacacccgtgggggcttcaccaatataaataaacttacgctggttgcgcccgaaatcatcaagcaagacggtgggattgtaggcagttactggctatatcaagagctgtatcggatggataacggatatgagcttcatgttttatttgatggagagcatatgcctgaattgattgttcgctgtgctgacattctcgtagaggtagaatgagagaggccaagaggatgaatatggagggaatagagatggaatggaccaccagtacctttggttatttatctactcccgtatttgtcgtgggcattgcgtgttacttctttcctgattttctatacaaaatatttgttctgatgagatatcgaaaaattaaaccgaattacgagtttgaagataacccacctaatagtgatatccctaaacatatcgaaataatattaaaagtactaggcaccataatggttatattagggatgatatggttttggttttcagaagagttttataacatattattttgacagcaaggagttgaacaccatttttgaatttatctggactttagtgatctcaattatatgtttaattgtcgttcttatctttgctgcaattgtacggtatgcgatagattcatccaaaacatcgaaaaagctggatgtattgatcaaagaagtacactatctaaaagctgaaattaaaaaattacaacaccataagcagcaagatggtagcaagcatattattgacgaaaaagtatagatgaacgacaagacttgaaatttttctaagaagggaacagaccatgatgaacccacaggtgaacgtacaagctgtttttatagacagagatggaacaattggtggtacaggtcattttattcatccgagagatttcagattataccccaatactcaagaagcaattatgcatttaaagcgagaaggaattatggtactggcttttacgaatcaatatcgaatctcacgtggagaagcaagtgttgaggattttgaagagcaatttcgtgagtatggattcgatcactcctatatatgtccgcatgagcaagaatgcagttgcagaaagcctaaacccggaatgttattacaggcatcagaggaacacggtctggatttatccaaatgcatagtaattggagatgtaggagatacagacatgcttgctgcccatgccgtaggagcgaccaagatcatggtgcgaacaggctggggggaatcttcattaaccaaattcagagacaaatggatggagaccgaacctgattatatcgcagaagatatttgggatgccgtacaatggatcattcatggaagagaattcagtaattaaaagacaggaggtaactgtgtatgggcatgtcagactattacaaaaacctcagggaaaagatcggcaatgagcttatttttatgccgggtgtagctgggattatccgaaatgaacaaggggagattctgttcggtcgtaaacataacgaatcaacctgggggttgattggtggagcaattgagcttggtgagacaccggctcaagcgatggttagagaggcactggaagagacaggtctagttgttgaacccgagaagattatcggagtatacgggggtgaagcaagaaggtttacatacagtaatggtcatcaggttgaatatttgactatcgtatttgaatgcaggatcagatctggacaacttacgcccgataatgaagagatgaaggatttgcagtttttcccggaggatcagcttccacccatggcaaaccagtatccaaattatatttttagctccaaccaagaagaacgagcccattttgaaagataattcagcgtggagctggagcttaatgctcaccttaacttatatttaccaaataaatcaagatcctagttatatgaggagaaccatatgttaattaatccaacgattaatgaggtcaataacttattcaagatgcatcatatcaatgaagaaatatctaaaattcaaagtttgtcaggtaccacagctggacgtgtttatcggttgagtacaagtctgaataagcactatattctgaaatcagatgaacccgaacagattcacatcgcccagcagtttttggatacgtataagaattcttcgttactgcctgaagttttgttgacggatccagataacacttatttcatttatacgtatatggaaggtacgacccatttcaaccggggccagaaaagagactggttaactcgtctggtgaaagagttattcaatacatatgtgcgttcttcagatacgaaatcatggggcagaatagagttcccacagaggacctggaaagaattcaatcagattagtattcaagaagcaaagatgaatatcggaagtgttttaacaacagatgattataatctggttcaatccaaagtggatcacctgtttcatgaggaagaagaaaagtttcttttacatggcgatacgggggttcataattttgtatatgatcaaaatgaactcatcggcgttattgacccatctccaatggttggacctatcctctatgatttcttgtatgcttttagctcttcgccggatgatatcaacaccgaaacattatttgctacgttcgaacttttagagcaagtagatatggataaatccagattgatagaggaagctctggtccatctatattgccgaattgggctgagtaacaagcatcatcctgatgatctgcctgagtatttgaaggcttggcatgaatggaaacgactatgtcatgaattttgaactagcaaagctttaaagctattgcaaatgccgtagttcagactatacaagacaggagagatatcacaagttggataacaaaaatagtttgcatagtccgaatggatggacctccgatatgcttcatggcgacttacttgccagtaaagaacttatctatgacaagtgtggctttgtatgctcacaaccacatgaagaaacacaaaatgctgaatatggtgcatatgtgttcaccataaatgctctctccattcgatttcgcgtcgccaaaaccacgccaaccaagatcggacaatttgttaccctatggcagcggagtgaggatggaacgacacagccatatgatggatcagatccagcagatgtgtatgtcattagtacgcgcgcaggtagccactttggtcaatttgtatttccaaagcatgtattgttacagcgagatatcatatcggatcaaggcaaaggtggcaagcgcgccatacgtgtatatccgccttgggacaatccaacaagtaagcaggctctcaaaacgcagcagtggcagcttgaatacttcctggaagtacctgttactgaaccattgaactgtgatcaagccagagtacttatgataaaccattataatcacctatgatttaggagtgtggtcctgatcgtattaacgtcagcaatcgtattcaccttcctgatcctaatcgttattctctttcaagttgctttagcggtaggtgtgccgtggggcgagtatgccatgggtggaaagtttcccgggaaataccctatctccaataatcattgccattacataacaatgagcaacaaagaaatatacaaaaacagagctctggcatgtatgccaaagggctctattaatcactgccgttcctcatttataataatgatagtttaaccctacatagagaagatcacggagaggagcggtttttattatgccgacctactactatcttgcagcagttttattagttgtaacagcctatttggttcgacgtaagctcaagattttccgtccagcagcaggaagacgcagaaaacagatgaaagttacgtacagacgaaaaaaagcaccattgaatcttggacttcgagaagaagtctcctatcagcaaaccattcttcaattggagaagagttacaataagcattttgccaacaaactcaagatccgaattcaacaggaatatcctcacatgaaaacgctggagtatcggtggaaattgatagaacttaagcgatatttcattatggcttcattacttaagcaggtgcccatgttcagtgatgaagttgatgatttgtggcatgagatgctgatgtttacgaaatcttacgctgatttttgtgcagaattaatgggttccacggtacaccatgagccggcaatcacccgccgcgaaacgccaggagcacgtgcatggtttgactgggtgtactgtcaattatttgagttcaccccctacagtgctgcaatctggggtgattttttcacttacccattatccagtgatgtacagaagctgatcgcacagggagatcaattcgaactggtaaatgaactgtttcatgccagacgcatgcaggaggatcctgaagctgctcaggtgattatctacttgattgatcaactacgtagatcggcaactctaagtgaagaagagctatctccagcatcttccggaagtagtgatttagctctcgtcatggctagcgccatggtgtattactccatgcataacgaggcgacatatgggttacacatggggcggctggaacaggaaattcttccacaggaaaaggcagcctatggttcctcgtcaagcagtggttgcacgagcagttccagctgttatgcggaccaatgtacagacaatagtagttcctcgggaggatctggatcatcctcgggatcatcttctgactcttcttgcagctcatccagctgttcatcttgtggtggtggcggagattaatgaagttgagtatctgggctacagtgaatctgcaatcttgaatgaaacagtcactagacaaatggagattgccggaagggaagagcacatgcgaagcaacaaattcacaccgtatttaagttttatgggttttggactagttattctgaccttaagcgtgaatgtaagctttaagctaggaattgagaaaggtttagatgaaggttcccttatgctgttgtcagttgctaatgcagtgttactggtatatccattggcatggggagtatttgctatacttgagttctacatgttctggaaagaaaaacaaaatatgaagtccaagctggaacgcggaaaaataaacaaagaagactacttggatcagatcaagaaagttaagaccagtttgggaatcaacattagttatattgttatcctgctgtttcagcttggatacgtcattataaactgggacgaggttaatgtttagacttctgaccgacctttcctgattttgaatagaacatacataacatttaggaggaatattcattgaaagtattatcaatcgtcagccttattgggttcgtaatcaattttttattaatcgtagtttttatagatggttcgcaagaaggtgcggaggtagcggcagttttgggacttctgggtggactgtatggtctgcttttctcaatcctagctttgatcatatcaagcaagagaaaaaagacccctgtaaatgttcatgaacaactgcttcagctaggtgacttaaaagaaaaaaatatcatatcagaatatgaattcgatcaaaagaaagagaagttactctccagatacaagtagtccagagcccgctacggtcaggtaaaggctattctattttctactcataccaaaaagctgaacttctgcaaacaaaaacagggcgttccctttaacggaatctgccctgtttttgtttgcaactatattttatacccatctcaatggtgatgatgtgcgtgagcatctggtgcgtcgcctttgacggtacataataccgaggtgtcatgcagatgtttttcggactctacttggagcgtcacatgtttgatttctttatgttccagcatgtgttcgatcttctgaaccaggatctcggatgcataaacatccatcgttccatcgactacgatatgtgcggtcagcgcattcaggttactggtaatggaccagacatgcacatcatgaacgcctttgacgccatcgacttgtttgatggtctgcaccagttcattcacatccacattggctggagtgccttccatcaagatatgcagggatgatttggtgacatagaacccactacgcaataccaacgccgcgacaattacactcgccagtggatcggcccaaccccagccaaagaacatcatgagcagtgctgccgcaatggccccaaccgatcccaacatgtcgctgatgacatggagataagccccacgcatattcaggttattctccgtatcgctaccacgcatcatgatccaggccaccagaatattgatgagcaatccaatgacgctgatgattaacatgcctacggttgcgacttctggcgggttgataaaacgcccaatcgcttcgtagaaaatgtagagtgcaatggcgattaacgtaattccgtttaacgtagcggccaaaatttcaaatcttctgtagccgtaggttttgccggtatttactgctttttcaccaaaggtgaacgccagtaaagcgatcccgagcgcaatggaatcggacaacatatgacctgcatccgagatgagcgcgagactgttggtgatgaatccaccaatggcttcaacgatcatatagatggtaataataatgaaggaaaacaacaggactttcttgttattggtggtgtgagcgtggttgtgtccatgatcgtgcccatggttatgactgtgatgctgtccggacatataaatcctctcctttggagccttgctccgttatgtaatatgatttcttatgtagctataaatgatccttaacaataattaatcgcctacaaatgaatatatgagcgttcgttcatatgttatggttttattataattctgcctcatagtagtgtcaaccagatttaaggaaatataaacatgaccggtgtgtctcagcgcgtatgtactagctaatgcgtttgtttttatgctaccatctgtgcagaatcaaagtgagatgtactcgctacatagaagggcggacaacgatatgaaacatctgctgctggcagacgatgatgccaatattcgagcactcctgcggcatgtcatgactaaggaagggtatcgggtccatgaagcgcaggatggattggcagcggtcaaactgatgcaagaaacgccgatcgatctggcgatcctcgatgtgatgatgcccggcatggacggactggagttatgtgattacattcggcagcactacgatattccaattatgttgctgacggcacgagatcagctatctgacaagagagatggttatttgaaaggaacagatgaatatgtgaccaagccatttgaaccggaagaactggtctaccgggtaaaggcgttatttcgtcggtaccatcgcacatccagcgatatcatccgtatgaaccggatcgtcattgaccgaaacaatgtggaggttaccgatgggcaatccattctctttttgccaatgaaagaatttgaattactttcacagctggcccagtttccgggccgtttgttctcgcgggatgaactcattcggctcgtctggggagcagattacgaaggagatgaccgtaccgttgatgtgcacatcaagcggctgcgtgatcgttttgccaattatacggaagattttgtcattcagactgtgcggggtattggttacaagatggaggtgaaagcaccttgaggaccttgtacgtccgggtattcctcattacgattgcggtgattatggtcagcggcatgctcggttttcttttgtccaacatctactatcatacgaagctcaaggatttcaatgatgagaagctggtgggcatcgcgacgcatatgaagcaatttgtggagcagcaacccggcacgatggagcagtatttgaacaatgccgccgcgctcgggtacgaaatctatgtgacagatggaaaaggcaacgaccaattcttcggccgcgaattccgtgaaaaagatctggacaagcaagctgtagaactggtgttgaatggtgaggtataccatggcgtcgcccagtttccaagcaaaccgttcatcacaggtttcttcgataatcaattaagcaataccgtgggtgttcatctacagctggacaatgcgaattatgctctctttatgcgtccagatgtaatcctgcaattcggtgagctgcgtatcttttttgcgctgattggagcatttacgataggtattagtatcctgatctttctgatcagtacccgctatctggtcaatcccattgaacgtctatccgaggcgaccaagcgcattgcgcaaggaaaatataatctgaaattgcctacctcaagacgggatgaaattggacagctggcccagcatttcatgaccatgagtcgtgaattggagagggtagatcaggcgcggcagcagtttgtatcgaatgtatcgcatgagattcaatcaccgttgacctcaattcagggttttgcccaattggtggcggatcgggatctgcctgaacaggaaagagagcactatgcatcaatcattgaggaggagagccgtcatctctctttgctcagcaaacaactgctactcctgtcctccctagaacaaggcaacgaagatctgagcaaagtaaagttctctctgcgagaccaattccggcaagcagttcaggtgctgcaatggcaattggaagaaaaagaactgttgcttcggatttcggtgcccgaatccatccagctggttggcaatgaagtgctgctcatgcaagtttggatgaatctattgggcaatgcggtgaaccatctaccacagggaagaagcatcgagattcacgcagagcagacggataaccagtgtgtgattcagattcgggatacaggagacgggattgctgcggagcatctgcctttcctgttcgatcgattctatcgggtggatcgtgcgcgtgaacgttcttccggacgaaccgggcttggacttgccattgtgcagaaaattatccgaattcatgacggtacaatcgaggtttccagttcgcctgagggtacggtcttcaccgtgacacttccgcagatgtaatctgttattcatttgccgttcattttcgcctcctatacttgggttatcaagagggaggtcacagaacatgtacttggctattcgggaaatgaggtatgccaaagggcgctatgccttaattgctacaatcatggtgctggtttcatttctggtactgtttgttacaggtcttgcacaggggctggcgtatgataacgcagcttcggtcaaaaatatggcagcaacccattttgtgctggagcaggattcgaatcatcgatttacccggtcacaattggatcaggatcaacttaatcaagctcgctccgtggtggggcaagagaacgctgagccactcggtgtgaaaatgacaaccgtcagtccaatcggcgacacaaaaaagatcgatgtcacgctgttcatggttaacccggaaggttggcttgctccaaccgttaccgaaggatctccgactacggatcagacaaaagggcaggttgtggtagatcataagttgactgaatctggcgtcacgattggcactgttctggtcgatcaagcttcgggaacggagtggaccgttggtggatttgtacaaaatgagtctttcagtcactccccagtggtgttcctgaatgaacaggaatggcttacgcttcaaggaggttcacgaacttcgcaaggttcagcagacaccaatgccaatgcgccgatatacaatgctattgcgattaaggatgggggcgatcaggtagaccgcctgagtgttgcaatgcctaatacggaagtcataacaaagtcggatgccgtatcggccatccctggatataaggaagagcagggatcgttgctcatgatgatcgcttttctatatgtcatctcggcgtttgtgcttgcggtattcttctacgtcatcacaattcagaagacgagtcagttcggcatattaaaagccatcggaacgcggactgcttatctggcgggtagtgtttcgttacaagttttggttctgtcggttggcagtctggtgattagcgtactattggttcgactgttcgagtccattcttcctgcatcgatgccgtttcaattaggcttgtccacccttgctctgacctgtgtgttattcatactcatgtctgtggcgggttcgttattctcggtgtggaaggttaccaaaattgatgcacttgatgcgattgggaggactgcagcatgagaaatcgattggtattacagggaattacacagacctttgaagatggtggcagtaaacggacgattctggacaagttgcaccttgaggttgctgaaggggaacttgtcgctgtgatggggccttcaggctcgggtaaaagtacattcctgtccattgctggcgcacttctcgaacctacggaaggacaggttttgctggacggggcttctattttgggcaaaagcaaacaagatatatccgatatgcggcttcagcagcttggttttatttttcaaagtgccaacctcattccgtatctgaaagtagaagaacaactgatggtggtcgcaaagctcgccggaacggaaaaaaacaaggcggagaagcgcgttcatgagctattagacacggtggggttgacccatcggcggaaggcatatgcagagaagctgtctggcggagaacgtcagcgggtcgccattgcaagggcattgatgaacgatccggctgtcctgctcgcagatgaaccaacagccagtctggatgcggaacgtgggctggatattgtcggcatgattgcacggctcgtgaaagagcagggcaagagtgcagtgatggttacgcatgatgagcggattttgccgctctgtagccgggttctttttttggaaaatggaaagctggtgcagcattagaaggagaatggtctgagagtctggagagaacactgattcaaggcttaagggcagagagcgtaagaagagggtcacgtattccccggtgggaaggtggccttctttctgtgttttcgactataattggaagaatagtggaattagatagagaggatcgggtgcggatgagtagcttgagtgcggaactatttccggcgctgagtacgtcaattcattggggaattattgaggcggagttcagattgaacgacatcgtggatgaaaagctggtgagtaatattagcatcattccgtttgtcggggatcaatgtgtcgtctttcaactggataatggagattgggagctgcctggagggacgcttgaagcaggtgagcagtatatggatggactgaagcgcgaactgatggaggaacttggggcagacatgcggtcctatcagatctttggtcaattctattgcacatccagtactttggaaccgtatcgtccgcatattccgcatccccattttgtgcgaatcatcggatatggagatgttgaacttgtcggtgatccgctgaatccggaagatggcgagcaggtggttgcagttgaagtggtagagatcgccgaagcgatccgaagatttcaggaacagaacaggcaggacattgcggaaatgtacaaactggcttatgtactgcgaaatgaagctaaacagtcaggcaggggccaggtattataattccagataacttacggaggtaatgatgattcgagataaaattaacgagctgctggatgcgttacccgaaatggaactgaaccgagcatattgggggattgagcgtatccatcaggaatatatgttcaaggagaataatttttatgatagtagagattaatatacatcgatggaagaactctgctttacttacggagttcgtatttaatgaaaaaaagctttaatcggtatgctatccgatttaagcttttatgattattttattatttagggaataatacaacattatctaggccattttctccaaagaaacgtcctggtacattgaattgctttccgtctagggtgattttgctgattaaccagccagacttccaaccactaccatctgactttaaagctatagcttgcacttgtccaacatcttcactactgaagttgatgacatctgtttttcctttttcaaagttgtcaatattataattattaagtaatatttcactggactttccattacttccgataatgcttatccaaattaaagaatccgtacctgcatcagcttcattagaagttacaaaagtaatcagatggtctttgaatgctgctttaaaattactctgattagtttcaatgttattactcggcaaagtgttgttactcgtagcatctacggtttctgcaaaaactgaagcaggtaacaataaagatgaacctaataacagtgaagagccgagcatcgatagtttttttctcatcttgtaaactcaccatccattttgatatttacaccaaatatgtaatttgatatattcattttctattgtacatgaaaatcctatatttatatacataataatacaatttggttataaagtaggagggtttggggtgtggatatagaatagtctagtagtatagaactattctaaagtgaaacatgtagcacaaatgaaaagctaatagagagtttgtatttattgtattttttacacaacaaaatacaaagtggttgttcatgtgatgttaataattcatatatttgaatagggagtgatatctaatgcaggaactttttaagaagatcatcaatacagaagtcaaacccttattttccaaacacggctattccaagaaaaatctaaatttctacaaagcggatggaaacctcacatataagttcaacattcaaagagcaaagtataacaccagtagacaagtccagttttatgttaattgtggtgttcattccactgagcttgcggagttgcattccgttggattgaatggagacatattggagtacatatctcattttgcctgccgaatcagagaaatagccccttccgctccggcccactataccttaacgcctgagatcgatccagacgctttatcgaaagaactggtgtcacatttggaagagggcatgtcattcctacactcgctaacaggggccagagatatagtccattattatatggaaaagacagcgctacatttaagcgaagtaaccttccgcttcctgctaaaagccggcgatacggaagaagccaagcattatttacagcaactgcacgccaaatacggagccgaaaagcgctggacgatattagaaaagaaatatgcagccgtttttgccgagtacggaatgtaatctttgattcaggaggggatgcccacatggcaaatgataaaggaacactcagaacatgcgaacatggacattcgtattataaaaaaagtgattgcccaacctgtccaacgtgcgaagctgaacgtaaaccgacagaaggatttctagccttgctgtcagctcccgccagacgtgccttggagaatgaaggcattacaacactactgcaacttgcggagtacacggagaaagaaatcctgaagctgcacggaatcgggccatctgccatgcctaaactgcgaaacgcattggaagaagagggattgtcttttaagaaataaccctcttcacccctttcctctaatccaagacggaagtaatctcctccatcgttacccgatacaacaagttaccttcactgagtagcagacgatgttggcgaaaatcctgccgtgcctgcttgaagggctgatcttcctcatttaacaaaacaatcttctgccccttgttcaatctaccgggtttctccatttttttaagcacaaacgtaccatgtttaccgtacccggcatcgaacaagaaatgataaccatccgtactgaggccagaggaaccggagatgtttggattcataaatgttacgttaggttcactggttccccctgagatacaaccgagttcaaaatcggtatagaagtagaaccagacctgcttctcatttaccacattgagtgcgtaacaatctgcaatgtcagctgcgcggttttcgtacactttattaccgtgctcatcccaggccagcagaccgcttgatccaattggatcgctccatccgtagttaccaaataccccttcatcgaagtaactggtccagatcgttcccttctctgtgacctgtacactttggataccgtctcccaacagaaactcgcggatcgtatttccgtctaaatcacacaatttggcgttcagatcaaactgttcatttccgtaattcgcacaccgtgctccgacgagcagcagatgatcatgcaatggttgtacgtaatgataattgaacgtctgtccccagatgacaacttcctcgatagtttgatctgtcacaataagcactttgtacgtatagctttgattcaatttactctgaacgaacatacctcgttctctttcggggatctgattcatcaaaagcacataaacaaggccatccccgccccactgggtggaaacgatatcgaagccctcgacatagtttgaaatgtcggcaaaaggcaaaagttttactttgggattggtcatatccatatcctcctttgtagtcaaatgcagagtcaccatctgcatctgtataagaggattatgacgtacgtgtactttactgaacatggcggaagtatagcgaaggtctttctttggcttttacagtggatgagtatgatgtttggtaacctgtgccttgacactcgtagtacaataaggaagttgtgtaaaattctatataataggagggcggagagattgctataaggagagtgtgaaaatacatacaacgcacgtgaatgaaggggtaagaatcacccgtagattcaatgtacaattacgaggaagactcatctcagaaaaacaaaactagttaaggaagtgttactaggtggaaccacatattcaagagcaaaagacagactaccgtccactaggcgtatcgggcttaggtggttggctgattctcgtccagattggattatttcttacgttgattttcctggcgctccaattggttctgtattgtttgcccatgcttacaacagagacttgggagttgctaacttcgaagcaatctgaatattatcatccgttatggggaccggtcgttatttttgaaacggtatataacgcactgtttttagtgtttagcatatatactatcattgctttgtatagtaaaaaatcgatctttcctcgtcttatgatcatattttatagtgtcagtctagccgttagtatcattgattatctattgttgcttcagattccgatggcgagagaacttgaggatggaaactcgttaagagatattggcaagtcggtacttacttgtgccatctggattccttactttatcaaatcagagcgagttcataacacatttgtaagataaatggtaagcaggaaatgcccgatcttgaatagaagctatctgaggtcgggtttattgtatatatgccgggctagtcatatagtgtaaaggatattgttcattatagaagtgaaaaggaggagagatcttgaaaatttacctggtaaggcatgggatggatgaggaagggtatcgaggcggatggagtgatcgtggacttacggaacagggaatcaatcaatccaggaaactgggagagcatttgcatcatcatgctgaggagtacaacatacatacgattattagcagtgatcttcctcgtgcagtgcagacgacacgggaaattgagaaacaattaaacatgcaggctagcttaatgaaagaatggcgggagatgaataacggagatttggcaggcatgctccataaggatgctgaagaacattacccaggggtttatttcaacactcttgaaatggactccccgtttccgggaggagaaagcccaagggatttttataaccggataagcacagctttccagaatcttttcaaaggtatggaggaggaaacagtcaagtccaatgtactgttaattactcatggcggagtgattaacatcctgtattacctgcttgagaagagggagtggagtaataagtccagcttttatcccatggacaacactggtgtacataccgttgaaaagggaaggcatggttggaaacttagcagcgcaaatgtgttaagtcatctagattagttgttttcatgatagattaaagagaagatggaggcgatgacatgagcgatcaaccaattgaactattgcaacgtttaaaatctttatccggcccatttccaacgtgggatacggggcagttgccggagcggcccgggaagctatttttggagtggttgagattggcggttgagaacaaagtgaaagaacctcacgctatgacaatctccaccgtggatcaagacggttatcctgatgcgcgggtgttgattttgaagaacgtaatcgacgaaacgttctattttgcctccagttcggagagtcgaaaagggcagcagttgaaggagaatcctcatgtcgctctgacattctactggccttcccttggaagacagattcggataaggggaattgccgaggatcggggagatgaagcgggcgctgatgatttccgcaaacgttcagctggagcaagagcagttgctatgacagggcatcagagtgaggttttggatagcgaggaagtgctgtatagttccattgaagctcagaaggaaaagataagacgtgaccccagtgttgttacacctcattggcgtttatatgccgtgaatgcacaagaggtggagttttggcagggagattcggagcgcaagcatgtacgagtccaatatgtaaagcaagatgggcagtggaagacactcagattgtggccttgatattacaacaggtgagttaggcaacacggaccgaactgctgtgtgtttctttttcctaacaatctgagggaggataaatctatgaaaatgattgaaagtttcttcgaaccatttcccatgttggaaaccgaacggacgttacttcgacctcttacttatgatgatctggaggatatgtacagttactgcgttgtacctgctgtatcggagttcacgacctgggacgcgcatcagagcaaagaagacaccaaagcttttttagattttgtcatgagtcgctatgagacggatctaataggcccatgggggattgaagataaatacaccaagaggctgattggtagttgtaactatctagggtgtgacagcgataacaggagagttgaactgggatatgtgttatctgatcacttttggaatcagggctacatgaccgaggtagtgaaacgaatcatccaatttggatttgatgaagtggggctcgagcgaatccaggccagatgtttagtggaaaacacaggttctgccaaggtcatggagaaggcaggcatgcaattcgaaggtgtgctgaggaaatacatgaaggtaaaaaatgagcttcaagatctgaagatgtatgctatcgtaaaagaagacttctactcgtgttaaataaagaacgtgttattgaaaagtcgtgtgtcatttatcatgctggcgagccatggattttcctataatcctgaatttatcagtgatacacaataaaagcagaagtaagaaatagcttgaattgctgcatcaaaaggtcaaggtattgtattttatattgtctaatccaataaacatatgccaagctctggcccattcccgatcgttgaggaaatgggttttatttttgttttcagcaagcaacgtacataatgtcatatcgtgaactggatgccttccgctataatcttcaagttatccaaatgtggattgaatgaaggaaccaggaggtacaacgaattgataggcaaaaacaaatataaatcactcgaactggaaacccccggcgtatatgagctggaagggcttgaagtgggagtgacatcgaactgcaattataaatgcgactactgctgcgcctacaatcgggatgatggagagtgcatcaatagtcaggaagtcatccgtattattagtgagcttcctcgtctcaagcgagtgcgattgtcagggggagaagttactctgaaataccaggattgcctggagattgtgacgtactgtgcagcacatggcattgatacacaattgaacagtaatgccagtctgcttactgaagaacgaatcatcgcgttgcgtgatgcaggcttgtccaacattcatatctcgttcaattatacggatgcggagtcgtatgctacgtactaccgcgtgcatcctcgcatgtatgaaaggttggagcagaatatccgtctgtgcacggaagccggtctggagacggtgctggaaacgttactgtttgaaggtaatcaagcgaacatgcaggccattagcgataaggtgtatgatctgggtgtgcgcatccatgagatccagaacagtattaagatgccgcataccgactggacccagattgtatctagagagtcgcttattcgatctgtaacagagctaattgaacataagaagccagatacaacgctctatttcacctgtatggatcggttcgctgaacagttaaatttgcgtgaacaaccgggtgtgtatttctcgaattgtgtggatggcacgaaacagctgcacctgcacggcaatggggatattctcatctgtgagttatgccatcctgtggtgattggcaacatctacaatggaacgtcgttgaaggatatctatacccagcagccgccggcgttaacggagtttttggaaaagcggccttgtcccgcgtacgatgctctttttgcagacgcataacaggaagacctgatgaagatatgtgatatgaatgttgaacgaaatatgtacacgataacagtgacatttaggattctatagattataaatcaaggtgatctgatttcctcaatgggaaaacggatcacctttttttattaaactattcagttacacaataacagcgattggagggttgttctgtcatcggagtggctagtgtaaataatctttagttcaattgatatggtttcagattcatttaagctacccggcctaatatggctttaagaacttagatgaagaggtgagcttcacatgatgaagattgatgagaaaccaacccggaaagaaccacataaacgaccgatctctccaagaaagcgcagatggctcatcatcacacttgtcatcgtgcttgcggtaggtggaatcctgtatagtctggctgaccgttacctgatccggcatgtacaggtggttgtagcggatgagaacacggcaacggtagcaacgggcaccaacaatgattccagcagtacttcgaccaccgcaactgaagtgagtgcaacgtcagatgattggaattattcgagtgatgatatgaaagtcaatattgaaaaggtacagaccggctctggctcggatcagattacgtattatgtcgccgatgttcagctaacggatgcaagcagcctgcgaactgcgctagcggacaacagttttggaacgaacatcaccgagaatacgtcagagattgccgcagccaacaatgcgatctttgccattaatggtgactactatggattccgcgacgatggtgtcattatccgaaatggaacactgtatcgggacagccccacgcgggatgcacttgccctgttcaacgacggtacgatgaaaacatataacgagaacgagatttcttcctcggaactgctggccgaaggtgcaaccgatacactatcttttgggcccattctgattcaggatggcgagattgtcagtgattttagcagtgtgaaaatcgataataacttcggtaatcgttccattcaagacgcaaatccaagaacagcgatcggcatgattgctccgaatcattatgtctttgtggtggtggacggacggcaggacaacagccgtggcatgaccttggcagaactggcggatatcatgaaaggtctgggagcaaccgaagcctacaacttggacggcggcggttcatccacgatgtattttatgggcagagttgtcaatgatccgctggggcgtaaccaggaacgtggcgtaagtgacattttatatctgacggagggacaaggatcatgacgatattaattccatcatatgaacccgatgtgcgtttactgaatctcgttttgcaactgcaaacctttaaacttggacccattgtgattgtggatgatggcagtggccccggttaccgtggaatttttgaaacggcagaagcgtatggctgtacggtcctgacacatcccgtcaatctgggtaagggcagggccttgaagactggctttcagtatattaaggagtatggacctcagggcggtatagtgtgcgcagatagtgacggacagcatctgccacatgatattaagcgtatcttcgaagtgctactcgcacaaaccacacaaggaattgtactcggcagccgtcgcttcagtggtaaaattccagcacgtagccggtttggcaatacagtcacaagggcggtcttttccctcacaacaggtaccaaagtatatgacacgcagaccggtctacgcggttttccctactccatgctggactggctgaaccagattcccggggatcggtttgaatacgagatgaacatgttgttaacggcacacaaggaagggtatgagattacggaggagtttattgatacggtgtatctggatcacaatgagtcctcccatttccgcccactggtagattcgttccggatctatatgccaatcctgatgttcagcacatcttcggtgctatcggcactgattgattttggattactgttcgttattcagtatttcacgcataatctgtttctgtcggttgttgcagcaagactgtgcagctccatcttcaactatacgattaatcggaagtacgtgttctccgcagggcgaacctctaaggttcggcagtctttgcccaaatatttctcacttgtcctactggtgctgttattaaactacgctttattgtatttttataatgaaaaactaataatcccgctgctcgcagctaagctgctgaccgaggtatccatctttgtattcagctattgggcacagcgcagatttgtctattaactctgaagagagagtaagcctatggcttgctcttttttggttgaaacggtttcatatgtaccctgaaataggttacgatggagtgggaaataaggagccttattttaggtgggatggatgtggactgatgttgaatcgtgtgcgcaaggacttgcgttattaccttcaggagcatcaggatcggaacaacctcattttgcattattttgcgtttttgtcggcgtttgtggcatggatttttttgtttattgatatcaaagtcacgctcctactcgctgtaacccattacgttttatcctggatggggcacttctattatgaaggcaataaacccgcagcttttcgttatcctcatatcggtttttatgcggggtttacctggtttttcatgaaaacgatggagatcataacccgcaaggacatcattcgtccatggctggaccaatcagagtaaacttaatgttaatttgaagataagtgtgcgaagttcgagtgtaaatgttcttttgttgaacttatataaaataaatatgggaggatgattatgtatcttcgaagtgtggaactcctgtcggccaagatcgagaatcggaaccaatatccttttgacatccctgcgatccggtccttggaacggttggaactcacgaataacgttactttttttgtaggtgaaaatggttcagggaaatctacgctgctcgaaggcatcgctcatcaatgtggattcaataccgcagggggcggcaggaataatacctatgagacacatgcttcggaatcctcgctcgggaattatctcaggctggcatggttacccaaaataacgaatggtttcttcatgcgctctgaatcgttctatcaattcgcatcacatgttgatcagatgccggcatcgcttcaatattatggcgggcgttcattacatgaacaatcacatggggagtcttttctcagtctgttcgtcaatcgcttcagttccaaaggcatctatctgctcgacgagcccgaagccgctttatctccagctaggcagctctccttattgcgtatccttcatgatctgtcaggcacttcacaattcattattgcgacgcattcacccattttgctgggatttccgggggcagagattttaagttttgacgatggccatattcaagagatagcctatgaggagaccgatcactatcagattactcgcagctttctggagaatcgcgaccggatgctgaatgaattatttaaagattaagttctcagtttaacaagggaagttactcaaccatgggcgtgaaatttatttatgaggagagattggatgaaagtaggtctgctgattgttgatatgcaggagagtattgtgcggaaaaagatggaccagacttcgatagaccatgcctgtgagtacattaaccatgtggctaatgtgctgcgctcgaatgatcatacggtcgttcacgtgcaggatgtggagggcatggaggaggcagcgtcagataagtatcgcatcattcccgaggtggatgtgaatgagaaggatctcaccgttaccaaggaagcctccaacgccttctggcaaactgacttggagcaggtgttgaagagtcatggaattgaattggtgataatctctggttttgccgcagaggaatgtgttctattcacctacaacggagcgatggagcgaggtttccggccggtgatgttgcaaaatggaattcttagcacacatcccgaagcactgacttcaacgtacagagatcgcaatgtgatctcatatcctgtggttgattatctgattcaataagtgttggctacatgccagtggaggtgatggttatgaacgtgcttaacgttgcttttgtcctattgatctcattggcaggagttgttttcggttttcaggggttgaagaaaaaatctccagtcatgatgtatatcagtgtaatatttattttcgttcctatacttcttttcatggattggttgacgttcttaccttttatcgctcccgcagcgcttgccagtggatatttggtgaaaaataaagacaagaccaatattcggactctttagggagtctttttttgtgcaaatgttcatgtccactgtgaaagtaaggttactccatggtttaaaccaaactttgcctatatctgctgtggttgaaagaatatattgagaacagggcacagcaaactcgttgtggagatcggtaatgtcatgtatagaccactagccaactcattaactaagggagatgtggaatgaagatgaatgtacaaattacgagtatcttgccagagcagaaggaattgtttctcaacctgtacaacttgtatttatatgatctgtccgaattctcgggcgaagatttgcgtaaagagggtacatatgatccaacgaacacctatctatatctggaacgcgatgaattacatccgtttttgattcagtatgaaggaaaggttattggattcgtactggtctgctcacctccatatgtgccggaaggtgtggattataccgtgcaagagctgttcttggtcaaaaaatatcgcggacaggggctggcagcacaagcgattgacttggtttttgctcaatttgagggtacatttaaagtggaacagcttgctaacaatgcggcagcagtttcattctggaaaaaatattatgagcagcatcagattgaatatactgagtctgaatataacattgagattgacaacatcgctggcagccaccggattttgtctcagacttttgtgcgtggaagagagatagatcctatttaaattagaaggtgattagtttgttcattatcttagcaaccaagggggatttgaagtggatttcaggtttatttcaggcagaagaggtagctagacattacatggatctcatacctgatgagcttaaggtgtaccatgaattcattcagatagagaacatcacatatcctttttatattatagagcgtcaggaatctccatttaggtttctcggcgaagctgaagtgatttcactttttgataataccgatgtgtcagatgacgaagatgaggtgcacttcaatgtctacactgtggattcagattatggaccaatgaaacctggaacagattatatgggaatgcttaggcatgatcatgtgaccaatgaatttatagagatgtacagcgaagaaggaacagcgtttctgagtagacgaaggattttatgaatgtaaggaagtttttatcacggtcctattttacttctcctgatttgggaggtagataggatcttttttaatttccatttaccaatacatgggttatgatgaattaagaggagtctatgggagtgacgtataagggggaagtacgcaggaatgccaaagcatcattttgtgattgaaaacaaagagcgagtaaacgggaatattcatacttcctactcatgggattcacaagggagaatacatggaagtggattaaccacagagaatcatgcgaccttggaagacgaattcattgcgtacatctatgattccctttgctggttggatacatggaatccatctacctgtatgagatgtagtggactgaacaactatggaataaccgttattgaagagcaggatgcgttgttgaagtttcatcaactgattcgagcctggatggatctatttagccatgcgactgatccgatcgttcttacagggagttactgtgctgatggagaagaacaaaaggggtactacgagaaactcgtgtacaacaaagttgaattaatcaacgaattaaacaagcttgcgaacatggcaaagtatgctgagataaatgggaaatgcattgtgcattttgggatatgaatcaatagaaaagtttcctgataaaaatcttaagctgctgagaagcaacccattagagaggagcacgaataatgactagtcgtattgtagttacgggtggagctattattcgagatcatatggggagggttctgctgcaaaagagatcagattatggagattggggattacccggtggtggtatggaaccaggtgaacgaatcgaagaaaccatgattagagaagtgaaagaggaaacagggcttgaggtgagttcttatgaattggcctccatctatacgggcgagaggatgcactatacgtatccggatggaaatgaagtagtatttgtaatgtttttatttgacgttattgcggagttggaaggaaaactctgtgatgatcaattaactcttttatttgaagatgaacagaaggagtcattacagcttgtttttaaaagtctggatgagattgatatttccacaattaacaatgtgcagaagcctatatttgtagacttgaagcaaggagagtctaaattgctacgcgagtgatagcgtcaatagaataactcaaaatgaatagaggttagatcatgatgaaaaacatggaattaattcaaccttttattcctgcattttctgttcaaaatttggagtgggttgctgggttgaatctgtatataaaacaagacaaatattatgacaatatttcgatagcagatattacatttttaatgaaatactcaaatgttacatatgaattactttttagattcaccaatattgaaagttttcattataatcctgatggtgttttagttaagataattgggtttaatattaaagatttaaaagatcacggatatcatccgatgaaatatttcgttgaggactacgaggacggaatattaggattttattgtgaggatattgaattgatacatgtgcaagagagtgagcacttagctttgtaagtcatagaacatcatagttgagccttttaataaagaaaggagtttttacattgccttggccgatggtacattttgcaattgcatccgagttgatatccgagccatcccctgaattgttattggggagccttgctcctgattcgatccatgtaagaactaatcttcgtacagaaaaggcaaaaacccacctcatgccggaggcaggaagatttgcaacagacgaagaacttaaagacttttttgaaacccaaaagaagttagcttatagtgatcccaaattcctgcaatatctgtgcggttacatcgcccatatctatacggatcgcgtgtggacattcgatatgtatcctgcatatgaagtccaccccaatggaagaagcgtgtatacacaggatgtcacaaagttagagtttatgattctacagaattggagaggggcccatgaatggttaaatgagctgaacgtgggaaaagcatttgatttaggtggattgctggaatccgaagtgtatcagtatagggaagaaaaactggagtttttagctaatcctgagaaccaacctttgggtgacttaaatattattttatctatggaagctatggacaagttcatacataaaacggcgttagcgctaaaacaattgtatacaaaatggaatgtctatgaagatttacgcagcaatgaaggcactgcacaaattcgttcgcatgctgcatttgaagatcaatgagattattttagctgtaaatgaaggaaatattgcggcacagcggttatatctgaaagtggttttccagttaatctggcatcatagaatcacataaaggaggaaggacatggacatcgttatgacgcttgaaccgcacggatggctggatatcctgcttaaacctaatcaaggagaacagatagagattccggtttcttttttgtcggatgcagttgaggagataacacgtcaattcgttgcattgcacaagggagccacggaggtaaccatgaccatgcagaccgaacctggagaatatcgtttctggatcaagaaacgttcacaggtaatcgttcaattcatggtgtatgagatgagtgataactttagcacggaagccgttacagagggccgtatacttatgtccgaggagttaaccttggtcaagttgaccaagcttttctacagagaactaagcaaattgaaggaaatgggactggaggaatatcacaaacggtggagttttgattttcccctgaatgcctatgagcggataggaagggtcgtccagatccgatgaaatcgattgtttttgacgagcgagaaggaggggtgacgtgccgaacatatataagggaagatactccgctcaaattgagggagaatttgttgtttttattatcggaatgaggatcaatcgtttgtgggctatacacaaatggctgcctgtctttaagtccatgggcccgatgattaaagaactgtatacgaatccggagaccggatttctgagtacagagtatttgataagctggcgcggggtgacgttactacaatactggcgctcttacgatgaattggagaaatacgcacggggcggaatacacttggaagcttggaaaaaattcaaccgatccattggtactgacggaacagtagggatttatcatgaaacatacaaggctcagtcgggttccttcgaaaccatatacgccaacatgcccaaattcggattagctaaagcgtctgaacatgtgccttcgacagggaagatggagacatccagacgcagaatgggcggagagaatgacccggcagtgaaagcaccagagaatccttaaagtggtgaatagagaggagcatgttatgaaggctaaacttcgaccagaagatgtacattctaagcagcttagctggttgtgtattaaaccgatgcttgtttctgtacggggcagagatatggcagctaaaacagagatataccgaaagttacacgaagggcaacaagctttatttctgttctattcctatcacaatcacacgaagagtatggcagagttttattggttttcggcatataacatcatcgagatcaagagctggaatggaattaaaaaagggatgcacttttttcatttagatgaaatggtaactgtactggaccagatagaaattctgatcacggacaaaaacagagtggatgaagtgtggcgtgaggtactgccaacggatctggagaaggacccgatcttgctccagagaacagaggcattatatgctgcatatcagactgtgacacaagtagctattgcacacatgaatgagataatcctgcaaaatcaggagatgtatctggagattgagtaaggttatatggatgtatgaatgcataggggctactcatgagtgagtagtctttttatcatgtatgagaacattggctgcacatcatcgctttttatttttatgctagaatggatagcaggaaaaaagcggaagagttaaataacattctcaagtaggtaaggagaacaagtatgaacgaggaagaactgctacagttatacggattggagcctgatgacatccatcgagagccgatccgagaactattgaagcaagagattgagaaccgaaagtcagaagataacgaggttctaaaactgttgtgcatcatgttattctgtattggaaatgtagaggactcccagctaatatggcgggccaaacgaaagaatcaggatacgggcagttatattgatgtgcagttattatgtggttcagggtatgaggagacattgttttacctggaaaatatggacggggaacaggcgcacaaggagttgctttaccttaaacagtgcgagccgtatgattttgttaatttctccaaagtggaatgggtctcagactataaacaatattatggtgtttgattcggatttataaggtatggaaggagggggactatgccaagtttgcatgacaacatcatattaagttacgaagttgatttagagaacaaaaaaaatcaggatgcgcacacgttcaagtcatactgtaccgaaaaatatggatgttttattctctggtgtaatggcccatgcgtttgatacaccgctgcatggcagcattattttggatctggatgagtgggatatagagcattttatcccttataatcgagagttgttagagccggggaagggctatggttggcctgtcagctatgattcttatgacgaattgcaaagatcgaggagaaatacaagtacatggtgatctcatcctcgtatggactgagtggttgggttttggcgaagaacgtagagattactgttcaagaaacggggtgaacgggatgaagggtgaaaacacacagcatggtggcaagaagggcgcaggactcagaacgggcattgttgttcttgttgttctgctcgttattctagtaatgaccaatccaaacgaagaagattttgttgcgtggctcgcaagtgaacatgacatccattcttcgtatgatgtgaatgaaggcaggacgtttacgcagacgatcgacggtgaggaaaagacgcttcattataaaggtggacatatactgcatatgggaatcttttcaacatatagttaccttttcttggataatgaagaaaaagagatccagattgaagcggtcggcataatgaatatgctatttagtaggtagctagattgattgtggacagttacaaaagttgaatgaaagttctgctgataaccacgcgctttgcatgatataactcgtgcagagaagcgtggttttttgcgcgaaatgctatagaaacagagctggttaacttcgtttattcgcaaattccacattatgggttatgatgtaccttgagagagaattttacatacataggaagtctctattttaaattaaaggcatttaaggtctttacgaggggagtattatccatgattgaatggagggctgactatgaaaaagttaaacgtagtttcattattattactacttctggtggcctgtcagaaccaggaaaacactgaagatgcacaacaatcaatagattccttggctcaaagtgtcacagcaaaagagacacaacaggatgaagaaatatcgacatcccatgagaaggaagacatcccaccagagtatctcgatgaaacaaactataccggtgacaaattggaaatcgtcaaacttatgaatgcccgtatacgttatttatacgaaaaggatgaaatagcatatatgagtttgattgatcctgaatctcctatatcaggtatgggaagatacaaagttctcaaggttacttccatgagcgatatcactatacaggagcaaaggaaactctatcaggcagtggtgatagttaatgagttaaatgagaacgacgaagagtatagcaatacgatggtgttttggaaaaagaaagaagatggcgataacgcgcaatggatttttgcagacattgattaagcacagtagaacactgtcttgatcatggagctgaaaattttatacaacctaaaggatgatgtaatgatggataggcgattaatactcattgaagggttaccgggttcaggcaagtcgacggttgccaatatggtatccgaaattttgatagaacaaggcaagacggtacaactatttcaagaaggggacttggatcaccctgctgattacgaaggcgtatctttttattatgctggagacttcgaggctttattgaaaacacatgaagattacagagaggttctggaaagcaatgcgattgcctatgatcaaggcttcctgattccataccgtaagatgaaagagcaatggggaatagaggttcccgatcacattgtacaggatattttcagacgagatttacgaaattccttttgagcaaaatgttaagctgatcaccgggaagtggcaagatttcacccaaaacgtgttaagcacgaatgatgactgcatcacgatatttgagtgttgttttatccagaatccactaaccatgggtctcgtaaaatgcaatcaatccaaagagcaaaacgtgcagtatgtattggaacttgggtgtatcattcatgctctgaacccgcttctcatctatatcgaccagaaagatatatcctatacatttgataaggcggttagtgaaagaccaaaagaatggtcagagggattcattaattactatacgaaccagggtttggggcaggcacagggttatcagggtgttaagggtacggtacaggttttgcaggagagaaagaagctggagtccgaaatctatgggttacttcagatggataaggtatggctggataattcggattatgaccgcgaggcttgtaggcacaagctagaaaagattctgcagtaaccttaatgaaatacgaatacataccggaggtcagttttatgacattttatggagtagccttaattgcaacaaccgcaatcttaattattataggtgttcgaagcaaacggaaagtaattcttagatggggcatagccagtttaattttattgctcgtactcatcattccctcattcatcatgggattcatggacggatttgctgatgggtggtcagcgagatgaccactgcagataacaataatgtatcgtatgaacaaaataacaacaaattcaacttccgtgtggcaggtattgcaatggatgcgggaagagttcttttgcatacgactgaacaggatgatttctggaatctgcccggaggtcgggtgaaattaaacgagacaacagaagcggctattgtgcgagagatgatggaggaactggatgttcatgtagaagcgcaaaggctcgcatatgttagtgaagatttctttgaatatgatggtctgaagtatcatgaagttggcttttattatctcatcatattgccggaagcccataagctgtatagtgaaactgaatttaaaggtttagaagataacggtaagttaactttccaatggtttcccttggacgaactggagcagatggaagtctatcctgtgtttttgaaaaaggaactgactaatctccttgatgcaaaaggcatcaaacacttcattcagaaatagaggaataggtgcctatggacattacatttattcgtcatggtcatggcgaacacttgatggattacccaggccaattaaattgtcagcatcctggcctcactgaattggggaaaagtcaagtcatagcgttgcgtaaacaagtgtttttttcgcctgaagacgtcattttggttagtccaacgaaacgtactattgaaacagcacaactcctaacccctaacaaaaatcttgtgttcttcagcccgatggttggcccaagaatgtttcctcaaaatccagagtttgttcctttcgtctgtgatcagatttattccaaggaagaactcagccatcagtatactgacataagaatgcttgaattggggttggattgttgggaagaaagtattaatcagatggatgcagatcggttccagatattagttgaacagcttcttgagtggtgcaggcaacagagcggcaatacgtttatcatttcacatgacggtacgatatcgaactacaggatattactcggagaaaaagagttaaccaaaagtgattttcttggtgaagcagagcagtacacgatccgaaacgtttaacgattaaaggtgattccgtcaatctcttctattacacattgcacaaggagtctgttttgtaggtggtctataactgtacttagggggactttcaaatgaagttatcggattatgaatatttaactttggctctggaagaagcagaacaatcacttattgaaggaacgtatccgattggtgcgataatcgtggatgtggatgggattgtcgtgagtaaaggcaggaaccgagttttctcggattgcgaccccaccgcacatgctgaggtggatgccattcgtcgggcaggaaaacatttgctggatgtagagaagaagaaattctcgaagaagaaagacttgacgctttatactacctgtgaaccttgtcctatgtgctcttgtaccatattaatgtcggggattaaaaagattgtatgggcagcggatgatgaagagtatggagggcttcgacgtttcaaggaagggcctcattttatccatatgtttgacacgttatcctgtgttgcagcaccctatcttgatctggaaaacagacagagagctttgctcgccaaatggaatattggtagaggtgtgcttaatacagagtgggagattccgaagcaatgatcttttttataaaggggatgaatacacatggaatttgtgggagagaaggtcagaataacaacagtcacagaacaggacctcgacttcatatgtcaacttgaatgtgacacaaatatatggagttttgaggaaactgttgaaacggatgatgaaaaggtccgtgagaaatatcgtagccattttgcagtcgcagatgagaaaccgtatgcctatgattttgttatacgccgcttgaatgatccggaagatacacccattggtattgttcagatgtggagttatgtggattaccgaaaaagctgggaacttggatacggtgtgctttcggaatacgcaggcaacgggtatgggagcgaggctacacgtcttttgttacaatttgcgtttcaagagttacaagctcataaggtcgtcggcatgtgtaattcacaaaacgttcgctcagcagcactgatgcaacatgtgggtatgacacgggaggccgtcttccaagaagaactatggtggaacaatcagtggacagaccagtattttttctccattttggatagagagtttaagcaagtctaataggtacgggaggaaataagatgactacgttggttctgttgtgtttctcgtaaattagggcaaaggtggttataaacatggggagaattacggtctatcattatgatgctttctctaccgttcccggtcaaggtaacccggcaggagtggtttttgatgctgatcatttcagtgagacggagatgcagcagatcgcttataaggttggttttaatgagacagtatttgtgttgaactctgaagtagctgacgtcagactacgttattttacaccggggcatgagattaatctgtgtggtcatgccacaatggcatcactgtatggtttgaagacgcgtgggatgttaagtgacaaagagttaatcacaattgaaaccaatgtaggtacattacccatacgatttgagtgcaataccgacgctatttacatggaaatgaaacaggatcagccgcagtttataccgttccagggggatatcgagaagctggtaagcgccatcaatctcactctggatgatgttgacctttctacgccaatcgtttatggaagtacgggagcctggacgttattaatcccgattcgtgaactgaactcctttatgaaaatgaaaccggattcttccctgttcccaggaattttaattgataatcccaaagcttccctgcatcccttttgtttcgaaacccgtgatttcgatgcgatgatgcatgccagacatttttcatcaccatactctggtacgacggaagatcctgtgactggaacagcctccggggtgatgggtgcctattatctaacgtatgtgaaaccggaaattgatgaggtacagtttgtgatagagcaagggcatgagattggaagagatggaaaggttcaagtgagtgtgattcgggatggtgaggatatggatgtcagaatgaaggggacagctgtatttgtgcgtgaactgaatgttgaattggacatttgatcatatacgaaagcaaaaagcgcgaagggagattaacattttgcaaattattgatattcggcagaagccggacgtgatgcaagaagcagtacagtatttctggaaacaatggggctcggaatcaagcttccatttctatcgggattgtatagagcgttctgtggatacagagagtgatgtgccaagattttatgtgatgttggacggagaccgaattatcggtgggtacgctttgttgcgaagtgatctgaatagcaggcaggatctctttccctggtttgcatgtcttcatgttgatccagaatatcggggccagaatctgggtggacaacttcagacccatgcattaaatgaggtgaaagcaaaagggtatgacaagctgtatttatgtactgatctgactgattattatgaaaaaaataactgggcctatatcggcaaaggatatctgctcgatgatgaagagacgagaatctatgaatatacgattggatagaggttacacacgctttatggctttgtcttgaattcgggaggaatgaacctatgattaccgagattaataaacatgatttccacaaagttaaacatctcacggactcgtgtcagaatattgaagtcaaggcggtaacgtctggcttgaatccgggacggatctatgtagatgatgcagagaatatcacagcaacactaatttggatacatggacaatctggttttcagttgatcggagactctcgaagtgaaccctttctgaatgaattgaaagagtacatgcgggaaaggattgaacctgaattattgaacttacatatgcatgccgttgaaattggtgtggtggacgagtcctgggaagatgttcttcggcacatctccgggaaaagagatatctccagtgatattcagcatgtattcaaattgaatccagatccgataagtcatcaagttcctctcgacatatgtgcttctcaggacgaggaagtcagaattctcaggatagatgaagtactattaggagagaaaagatataacaattctccatttctaaaggaaaaaatctctcacttctggacgacaatagatgattttttacaacatggctttggctatattgcagtgcataacgatgatatcgcgagtgtttgcttttcggcatttattgcagatcagacacatgcggttgatattgaaacggttgaagtctacagacgaaggaattatggtgcgatggtggcaaaagcttttgtagatgaatgcagtcgtgtaggtatacatccgtattgggattgttcaccggacaatgcgggttcaattcgtctggcacagggtgtgggcatgtcactggattttaactatagagtttactggtatgatctatccacgtagatatgtatgggatatgaaggaggatgtgcagtgagcgaatcattagaggatcagattcaatttctcattgagattgataaactcaaaacgatagaacgaaagacgagaattatgcatggtgagagacttgaaaatgatgcagagcattcctggcatctggcgatgatggccttggttctacagagtcacgccaacaaggatgtggatatgcttaaagtcattaagatgcttctcgttcatgatctggttgagatcgatgcaggtgatacttttgcctacgatgcggtggggaatacggataaatatgatcgtgaactcaaagcggctcatcggctgtttggtatgttgcccaaggaacaggctgaagaattactccagttatggttagagtttgaagccaagcagacgcctgaagcgcaatttgcctcatctctcgatcggttgcagcctcttatccacaatcatcagaatgagggagatacgtggcagaaacataacattacaagtgaacaggtgttaaacagaaaccgtgaaattgcaaacggttccgaaacattgtgggagtatgcgcagcagcttattcagaaatccgtggatcagggaatcttgaccaaatcataagggtacgttttcacgtatgcactttgaagatggaggagaagcatggatgggatatatcatggagctaagaaaactggtgggcccgcgtcctctaattatggcgggttcatgtgtactcgtgttcaacgaggaaggtcacctgctgctacaaaaacgtacagatagcttggattgggggacacttggggatccatggaacccggggagtctttggaggaaacagctgcgcgggaattgtatgaagaagctggactgagagcggaatcgttcaaactcattagcattttttcaggtgaggacatgtactatcagtatccacatggtgatgaagtttacaacgtcatggctgtttatgaagctgcaggcatcaagggcagcccaaccattatggatgatgaaggtctggaactccgatattttgatctgaatcagccgattcctgagatcaatccgtttacggaatatgtgttgaagaaggcaggatatatcagaactcactagctgtatacctgattataaatcttccacctttcacaaatgggtgtggaagatttttttattttcaactgataagcaccctaaatgccccttacatctaccccaaaaattaactgaggaaaaatatgctagaatagggagtgaacatttaaaatggtcaaatagaggaggaatagtgatgatgtttggttctatcattacaatattagcaatgttgattaatgtgttgttatatggactgggcgtgtatgcgctgatcctgtttattaagctagcccgacgtgggattcaggcactggatatctacctgtatgaaaaacgcggagagcgtttttaacgttcagtatctcacactcgaacagaattatcatttttctctcagtgttttatctttcctattctagtatgattaacgcatcaatccagtaaagagaggttcatgaatatggatgcttttttagagcaaattaacgagttaaaccagcttcagaaagacttggttagcctacatcctttgtttgcagaacattatccagtggttgtagcctatgaagctttattatatatctatgattattcatccaaaacacaacaatatgagtgggtgaagacggtaccggacgatttatatattccagatgaatgccttgctgctatgccggtgcaccatatggatggacgaatgtgtgcgattgtaacggatacagcgttcaaagatctggagcagaaagtttatctgttccacgaatatgttcattgttatgtatatgagaaatatggtgaacgaatcgtcaaccgtcttcagattaagcataaaatggaccaactgaagcgtgtaacatgggaactggattatgagtttccgtatgaagatgaaatcgttgtggagcggattaactcattgttgtctgctttgaagagtaaagacctgacacaagtacagacagctagaaaggcgttgttcacttcattaaatgaagaacaagccgagtattggagctggttggagtggaacgagggttacgcgcgttatattgagaatctgattcgggcaaaatttgggcaggaaagcaaccattttggagatactgctccgtttaatcgtctagtattctatgaatgtggatcggaatacattagtctgcttgtgaaggagcacccggaataccatacggatctggagcagctgtttgaccggacgcaagtggagagaatacagggttaatcacgcatctacggtgaaaaagctggagcagagtgaagtcttactaatctagccatctgtacgttacctagtaggttatatcgtttcttttcctaagtatagtagaatacttcccaataaaaggagatcatctctatgccgttacctatggttcatctcaatattgctaatcgaattgcagactcgctacaaatgcaggctgatcgaggttcattctatctggggaatatcgccccggattccatacatatgcgcgaaggtacaactagagatgataaggaatacacccattttaacccgaaagatgatggagattacgtaagtgaactgaaggatctttactcattctatatgcaacaacttaccgatgaaggatggaagtggtttgtgcgaggatactttatgcatgtgctgacagactattactggttccgtagtgtgcatcctgaattcgtggaacgggtcaacaaggtagatcaacatacaggcagaagcagatcgaaggatgaactagcgcgtttatattaccaggagacggaccagatcgatttcaatctctatcaaggttcaaggtggagcgaagaggtatggcaggtgctcaacagctcaccgggttatgacatgacggatcggttaactgctgatgagattgtacgctggcgggaccacacgttttcttttcttaatggggaagaaccgggaattactcctgagttcatcacgggtgagagaattcaggtatttgtggaagagaccgtagagcgactgatctctatgttgtcttcatgggacccggagttacgtaacttgatatgaatatagatagttagttagtgcagttgagtcatttcattatatactgtatttattacttctctactcattactagtttatttaatactaagtcagggaggcatgcagtatggtgaaatatgtaggagtgttgctcgtatttgtcattgccacgttcattgcagggtgcagtaaaccgaatgaatcgaacgcggaagagggacttcctatgctgatcactttaacgtgtaatccagacctcacttttgaaccatgccaagatgttgagtttgatcgatctgacgagattcggatcatgatggatgcaatacataaggccgagcgtatgccgggtattctcaattatagtgcacagtacgacctgagcataacaaatgcggacagctcgataacacggtatgatttttcactaggaatggatcccaagatgcaaggcttgttagtaaacgaggaagacacgcatactggatatagcattcctcttgaggatgcgaatcaactaagaagactgattcagcgacgtatagattaagaaggtatatggaacggagaagaacctgtggatgacaaaattaccattgaacctttgacgcaatcagatgcagatggagcgtctcaggtgtttgagacaaccattcccgcagcatttgatcaggagggaataggcttacttctggatgatattcaggatgaaataacacagaaaaaagcgatgattcacatggcattgcaagcaaatgacaacatagaaccaagtgtgtttttcctcgtcgccaaaatgggagatgttattgtaggcacaatctcgtttggaccgtgtggtaaggagattcgagaatgtacagagggccggctgaacgagatcggagaactgggtagcctgtatgtgttgcccgaagttcaaggacagggggttggttcggcgctcattcttgcactggttactgaactgcaacggctgggaattcagcaattctgcctggatagcggttaccagatcgcacagaagaagtggcaacgcaaattcggtgaaccctatgtggtggcgaacaactattggggcgaaggaactgaccatatggtttggttatgtgaagtacagaattttatagtaaaatgaaatgaacaaaagagatgacgacctgtattgtataggggtcatctctttatctttttgcatcgatcgtggacgattgttcgtacattgtatcatgtgtgtttttatgtaccggaggaaaaaaggagtgaacatatgtcaatacagtggaatacacccaagcaacggttatctcctaatgcagtaaacctgtggagaattagcgccatcatatggaatgtaataggtttcttgatccttgccgtactgttaatactcgactccatctatggatggaagacgtggattggttggattttgtggggcgttacggccatatctgtgctctatgcggtgtgggatattttcatccagccctcatggttatacaagcattggtattatgatgtgaatgaggagttcctgcaactgaagcgtggggcgctaaccaaggtacatcagatcatccccatggcgaaagtgcaatcggttacaacaaatcagggacctttaatgcgaaaatatggactctattccgtatcggttggtacgatgggttcatcgcatgaaatccccgcattgccagaggaagtcgcgcttgcactccgtcatcagattgcgtcctatgcgcggattaatgaggtggatgaatgatcgatatgaagcgacatcatccattaaccatactgtggagtctgtggaaattggtgaagaattcgttcgccatcgtcctgtttttgtttgttttccgtcagggctcagagtcccaatggcttttctatggaaggatcgccttttatgcaggtatttccatcggcatcgtgtcaatcatctggaagtggtttacttctcgttatacagcagacgttaaggcctttcacatctacagtggtgtgtttaaccgtacccgaagaacgataccgtataccaaggtccagaacgtgaaccgacatacgacgttgtttcatcggttgttccgcgtgacgtcgatccgattcgagaccgggattaagggagaagatgctacctttcagttacacgttgtttcactttccgaagcggaacagctggagaaaattgtagcaggtcatatggctgaagaagcagaaacagcaggagcaacagaggaaaatgatacgttggatgcagttaagcccatggaagagggagaggcgcaatccgaatctgttataacggatgaagccatgtctctacctgcaaaagaaaaacaggaacgggttgttcattatcattccacccgcaaggacatattcaaagcatcctttacctcgcttagttttctcgtactgattccggtcctggctacgctctattcctgggtgaaagacttcttccctgatgaagaagtaacggaaagtttgttgttaacctggctcgattcctggtggattgccggtttgatgattttggttttattgattatatctattgctctgggcatagtcagaaccttcgtaaagtatggcaatttccagatcacctcggatgccaagcggatctatatctcgaagggcatgatggagcaaacgtcattttcaatcctgaaagagcgagtccaagccgtgaaaattacacagtcgccaatgaaaaggctgcttggactggcggaagtagaactgaccactgcaggtagtctgggagaatccgagcaggaagtgaactcgctctatcccttcttgcctgtgaagcaagcctataccctgattgaggaaatcctgccatcctatcgggttacgcaagagatggaaaaacttccacgaatatcactatggctgcgcctgctcaaaccaagttggggatggatcataattacgggtttattgtggtatttcaaaccattggtgtttgggcagaaacatgcatggtggatgatttccgcgattctgctcgtgtggattgcaacatgcagagtgatggactttttccatacccgatacattctgcatcagaatttcattcaacttcgaaccggtgcgctcacgtcaacactcttcatctccaaacgtgagaaagtcatcgaagtgcagatcacccgtaatgtgttacagcgttggttcggtgtggcttccattcataccgtaaaccgtgccaaaccagtactgcatcatcgggcacatgacatttccctggatacggcgaaatcatttcaatcgtggtacatgggtcgtacccaagatgttcagacccgttaattgcaagagcaagtgcaggaagaccacatcaggttattctgtgcttgctctttttaattgaagacagaggaggaagaacaatttgattagagctgtattctttgatgtggatggtacattgctgagcgaaatagatcggagtttatcaccgcgtacagctgagtcgatccgggatttgattcgtaaaggcgttcaagttgtactcgtcacaggcaggccctataatttatgcgaagaattcagaaatctcggaatcgatacgatcatttcggctaacggagcattgatcaaagcaggtcatgaagtgatacataagtctgtactttcagcacatatggttagagcatttagtgagtttgccgagttgcacgggcacagtatttcatattttacagagtcatttgagacaaacgggttgtgtacagcagatggtcgtgttactgaggccttaagagatacgcttggactcatgaattccccgcagaaaatcagcacgttggaacaggacgtatattgcatttgtttatatgcggatgaagcggagacggagaaattccagtccagatttccttctttacgattcgtgagattccatccgtatgtagtgaatgtgctggaagcgagcgaagtcagcaaatctatagccgctaagaaagttatcgactacctgaagatatccagagaggatacaatggcctttggcgatgggaaatggcggagaacggattaaacaaagcgctaattatgtcactctgcgggcaagtgaagatggagtcacccatgcattgaagcaatttaagattttatgagaatcgatcggctaaaaagatgaaggatatccaaattatggattttcatgtagaatgatatagcacgtattaagccctaaagcatagggtgttgatcgaagggtgacttatgaaaaaggttgttattgtaatcctgtcgcttgtcgtacttgttggtgtatcctcttccgcttatgctcatccaggcagactggataagaacggtggacataactgttcagccaaatccaaacaaaagggtctgtgcacgggttatcactatcacaaaaagaaaaaatgagaatgagctgtacaagataaacccggccatcgttcaatgtatggttgggtttgcatgtgtaccattgatttaaaatgatggaggcggttacaccatgcagatacaggagatatcggtgtggaatcatgacgatttagtggcgatgctggtcgaaagctccagtgaggggttcagacatatcgagcgattaatccatgaatatgagacaggaatcaatacattcgagcaagaagatgaagcgctttttgaatgcagagtgcacgataaggtggttgggatctgcggtctgaacagagatccttattctgaagtgactgatacaggaagaattcgcaggctttatgtgaagagagaatttcgaagacatggggttgggcgcaggctgatggatgcggttattcaaaaagcggaaaatcattacgctcgactggttctgtacacggatcaaccggttgctggatctttttatcgcgacttggaatttagagaagtgacgagtatggagaagataacgcatgtactggaattgggggagaaggaagatggatcatattaaagccgttatttttgatttggacaatacaattctgaacagaacaatgacctttgacggcttcacgcagagtttgattaaaacctattttggtcaccttgagtcaaccgaagatataagcaaacgaattattgaactcgaccaggatggttataaggacaaaccctttctgttcaacgagttgttgcatgaactgccctgggcagagcatccgccacatgcagaactgatggagttctatggcagagagtatgtgcgaagttcagttctgatggaacaggcgcgagaagtcgttcagcatcttcgggggaaatatcgaaccgggttaattaccaatgggcagaccgatattcagtatgggaagatcgatcaactcggtatccgggatgattacgaccatattattgtttcagaggaggctggagtcaaaaagcccgatccacgcatatttcagcttgcgctagatcatttcggtctaagccctgagcaatgcatctacattggcgatcatccggtgaacgatattgagggagcggcaagcgtaggcatgagcaccatctggatgaaggtcaaccagccgtggcaggacaggattacgactagtcctttacatacgattgagcatctaagtgagctgaagaaactgctttagaagacggttatataaattgaatataacatttacacaaaacgtagaggacagaaataacctgaagaagcggagctaaaagctttctgaaagaaagctacttcggaagcatacacctcgcctttatccccggatttaccctttaggaaaggaatcaaaaaatctggggataacagcgatcggaaggttgttctgtcatcggagtggctagtgtaaatattctttagttcagtttaaatagataaggactactataaccccagtttggaaagcgaggaacatatggaaattagacagatggctacagcgtttttgagcaatggctcagacatgctgatgatgaagaaggcgggtagcagattgtttgattttgaattctggggtggcattggtggacatctggaacaaggggaactgaacgtacccatgagcgccagttatcgggagattgaagaagagaccgggttcacgcaagaggatgtcgaacactttcggcttcggtatattctgttggaggttaacggtggtgagatttggcagcagtttgtatatttcggagagaccacgcatcgacattttgtgccctcggatgaaggcgagttattctggataccactggatgaggtactagacttacattcgtctattctgatcaaagcaacgcttaggcactatttacaacacccaggagcagaggacatctggattggcaacgttcagagcggaacagacctaaagggcactccacaggtaatatggaacagaatgcaggaaacgaaatcatttgagccaaagggggttaatcgataatgttgaaatatagaatcaaaagaaaaaaattgagatggataaattacctgttgatcactgtactgattgctataattcttccgagtagtcatgtagaggcaggcagcacgattacagtgaaaacgaaggtccaatattacaaaggacagccatacatacatctaacaggtggtaataaatctgtgacggataaactgaacaagacatttaaaatccacgcagtgaaagcggttcgcctggacaaagaagaaaagaaatcaaacaaaaattatttctacattaccatggccagtgtaaaatacaatgcaaaagaaaagttatctgtggtatatgaagatcatgtgtacactggcggagcacatggaatggatgcgacaaaatcatataactatgatttaagaacggggaaagaactgaagctaagcgagtatgtcaaagacgatactcagatggagaaggtggagaaatcaatctccaacagtctattagccatgtataatgcaggagtttctatttttgaagaaaatatttatgattttcagcttgaccaaacatctgaattctttttatatgacaaaggtatcgtcatccgattccacccttatgaggttgcaccctacgctaaagggtttgtagatatcaaagtcccgttcagtaaattcaaccaatagattgtttgtaataaaaggcatgatccagttcaatgaggtcatgtctttttctatttatacaatcattcaaaatactctaaataatttcaataacttcggcttctatgtttctacataccgtgtaaatagcttaacccattccaagaaggaggttttgttatgaaacgtatggaaacatgtttcaggctgaccgtagcaacgtgcacctgctatggcagcctgaacgagcgaaccggtttaatttagcatagggcagaggcgattgttatgggttgttggaagaaactcatttcgtcaaattatgctgtaataattcgatctttcgtttgtctgttccgatgttctatcgcttcctcataatccccgatcagtgtatcaaaaatatgctcccacgaccgctgctcagccagctttctgccttccagtcccatcatcctcaattggttcacgtgatttccccagagacatatctcccgaattagtgcatcagcctgacctggctcgaataacacaccattgcggtgaggggatatcagatcctttacacctccagcattggccgccaccacagggagtcctgaagccatcgcttccagtaccacattgccaaatgtctccgtagaggaaggaaacacaaacagatctgccgaagcatacataacagcaagttcttcgccatgcatataacctgtaaaggtgacattgggtggggtttgcagacgcattttcgggagagatgggccgtcgccaacgatgatccagtgtacacgggactgcatttcctggggcaactgctgcatggtagtcgtgagtgtagcgatatctttttccggggcaatgcgtccaacgtagagtagaataaggggagcggtgatgtggtatcgttcacggatatccgagctgcgtttatcaggggagtacaggttgcaatcaatcccgcgagaccaaagtttcagacgctgaatgccttgggtttgcagggtgtttaacgtttcctgcgatggagttagggttgcatcacaggcacggtggaaccactggatatacttccagtagagaggaatcatacttttcaaccgatagtattcgagataacgatcgaagtgggtatggtaggagacaacatgcggaagatggtgtttgagcgcatatctcagaccaagcaaccccatattaaaaggcgtggcgatatgcagcagattgggttgaaaggtttgtagctgcttgtgcgtgtctgctctgttgggtagagcaatgcggcattcgggatacagaaaaaaggggatgttggcaaccgatcggacttgagtctcatggcttccttcaatgatggagttcggagtaaacagcagatgttcaattcttctgcggttcagatggttactcaagcggtggagcgtgccagcaacaccattggtttccggaagataggtgtctgtgaacaaggctaggcgcatcattacccctcccaagactcgtgatgccaagatcataacagcggaacattttccagaggtcaagtgcacgttaacttgacgatattccctgtaaatttgttaaaggatatactataccaacttccataagttcaacttatatagcgtattctgatatgatgtaataacgtgtcggcgtagttgaacttgaaatttacacgaaacggagagggcagaaaaaaactgaagaagcggagcgttcgcctttatcaccggattttaccctttaataaagggattgaaaaaatctggggataacagcgatcggaagtttattctgaccgcgtagtggtccagtgtaaaaaacacgttcaaactatttagacagagagatacaggaggcagagaaagatgaacaagttacaagaagaattgcaggagttgttaccacttgatcagcttgaagagatgtcaggtgaagaagtggtggggagtgttgccatggacctttaccgggctgaattttcgacgattcgagagagtgggtcagaacttccgcaagtattgcgagatatcattctaatcattgatctggataccgagctgtccatgaacgggatgaccggtttccttgagaatgccagcggacagtatctgggtgagacgataacaactatggagcggatcggcaatgatgcagatgccgtgatcctgaagaaaatagagcagatgttgtccgaaagtggcgtaacgcacgggcaattacgagataatgtgaatggcctgtccgaagatgacatcacgacaagcctgcaaacacacggggaacagattcacgaggtattacagcagattgaactggaagccgcgaatttgagcatgcaatcggataacgaagaaagctttgacctgctgtatcaatatgtggacgaaaataaagaacgtttgaaacaggagatgcaacacgttttgtctaattgagtgggaagaggaggcaaaatgacaatcatgaacaaacgattagcgctggaatcctttttggttaccttgttattcatcatcggttttgtagcttggaatgtcattcaaggcatgatcatgaccatgaattatgtacctgatctgacgaacaccgcttcttctgttaccctattgcaatccaagattgcttttggaagccgtgttcaatgggatacaacatccatgattatggctgttgccggatttattttgctagccgccgcatattacggtcttcgatcaggaatgcagcgttggacacagcgttcctgatgttttatccgctttgagtccatgttctgtacttacttacgcggtctttgcaacataccaattgaaactcatttacaactgccctgagtctattagactcagggtttttgctatggctaatgtttttccgcttcgaaggggaaattttctagatccaaggtcaaggaagaatccgttacaatgatcttgtaagcgcttatcgttttggatagagagaggaggagagacagagatcatgattacaaccaatcagatttatctcgatcagacattgcatagcaaagaggatgtatttgattttatatctgcggaggcagagcgttacagcatcactacaaaccgtgcacaacttgcggctgatctgtgggaacgcgaacgtgtctactccaccggacttcaggatcactttgcgattccccatacccagagtgaagttgtaacacgtccggcagtgatggtcattcgattgcgggagcccattgattgggaatctcatgacggcaagccggtaaaatatatttttgccatccttgtgcctaaaggtcatgtagacgtatcccatctgcaaatcatctcttcacttgccaccttattgctggaagattcattcaaaggggctatcgcagaagcggtgcagccggaagatgtatatacgttgcttcatcaatatacggaaggactggtgtcataatgaaaatcgtaggtgtaacgtcatgtatcgcaggtctcgcccataccccgatggccgccaaagcattggagaaagcagctcagcaactgggttatgagatcaaagtggaacagcagggagccatggggcaagtcaataagctgacggaagaagatattgctgcagcgaattttgtcctgattgcagctgatcaaacggtgaaggacatggatcggtttggcgataaaaaaatcgtacgtgtcaaaatcggtcatgccgtaagtcaggcagaagcggtattaaccaaagctgtcgaggcagtgaacgcacaagcttaaccccaccttccacatgaggagagagtacgatgagaaaatggtttggtgaagcaaaaacacatctaatgacaggtatttcctatctgctgccggtcattatcgcgggttccctggtcgttgccatctgtaaaattatcgcactatcaatgggcattactgatcttgatccgtacaaagatggaagcggattcttgcatattttatacctcgtgcaaaatgtaggatggagcggcatcggactattgacgattgtcctgtccggttacattgcgtactccattgctgacaaacctgcgctggccgcaggtctgatcggcggggtgctggcgcagcagaccaacgccggtttcttgggcgcattaatctccggtttttttgccggatacatcaccttgtgggtcaaaaacaaagttaagattacaggtccggctgctggctcggtaccgttaatcattttaccgctgattaccgtcggtttaaccggatttctgatggcggtcattctggggggcccactgggcgcactaaatgaatatctcattgcttgggttcaaaacatgagccagagcggaacgaataccgttgtgcttgcgattattctgggagcgatgattggattcgatctcggcggacctgtcaacaaagcggcatggatggcaggcaacgccctgttcctgtccggtgtctatctgccaaatatttttatcaatattgccatatgcattccaccgcttggttatggtttggcgacattgctgatgaagaaacgtttttccaaaacctatcaggaagcgggaaaaggtgcagtgattatgggtgtgatcggtatcacggaaggtgcaattccgttcacactgcgtaaccctgccaaaatgattctggtcaacatgtttgcctgtgcaacgggcgctgccttgactgcactgctgggagcacatatcatcatgccaccaattggcggcttatatggagctgtgtcagtaggtaccccaatcgcgtaccttgccggaggcattgtcggcgcactgatcgtggcgggtggcaccatgttggtgaacttccgcgatgaagaagagaaacagcctgccaagactcaggaagcttcagtgaagaaaaacggggaagaaatcgaactcgtttttgactaaaagtatatgttcaaaaagatcggttttcagtatcgagaagatgggatgaaggtagaaatggagcagcggagcgtagggaaaactacgtgagcaacggacatttcggctgaattccatattcgatactgatgatgccaacaggcatccctcgtaatcaaaagcggacttttttgaacaacctttaaaaagcatctggagggatatagagatatgagtgaaagaaatcgtaccaaagtacatgtgattccacatacgcactgggaccgggaatggtattttacgacctcccgttccaaagtgtatcttgtcaaacacgtcaaggaagtattgaacgcactggagaatatcgaaggatttcattattacctgctggatgcacagggctcgctgctggatgattacatccgctggtgtcccgaagatgaggaacggatccgccaactggtttctgccaaacgactgatgacgggaccctggtatacacagacggatcaattggttatttccagtgaatccatggtccgaaacctgtattatggtatgaaaacagcacaaaagtacggacatgcgatgaaggttggttatgtcccggatgcatttggacaatcggcacagatgccgcagatctatcgggagtttggcattgaacgtttcctgttctggcgtggtgtctcggataatacgaatccacataccgagtttacgtgggaagggtcggatggcagtcgtgtatttgctgtacagatgccattcgggtattactacggtggtaacattccggaaaatgaagaagatctgatcccttatttggagaaacagattggtgcgctggaacgcaaagcctccaccaaacatatctatttccccaatgggtttgatcaggcgcctgtgcgattgaatctgccggagttgattaaacggttcaatgcactggatacagaacgcgaatatgtgatgaatgaaccggaacgttttctggcggagatcgaagcggatagtcaggatctgcctgtacttcggggtgaattaatggaagccaagcacatgcggattcacaagtccattttttccacccgtgcagatctcaagcaacagaataaccggattgaaaatctgattgctaacacgctcgaacctgtacttgcgattagccattctctcggacatgactacccgcatcgcattgttgaggacatctggaagctgttgtttgagaatgcggcacatgacagcatcggtggttgtaacagtgatacaaccaatcaggacgttgcgttccgttacaaacaggcctatgatatcacactgaatttgcttgacctgcatatgcggatgattgcttcaacgatacagcaggaggagacatttgcgttcaccctgttcaacacgctaccgtatgtgcgaggcggggttactgagattgaagcttatattcccgaagaatcctttgtaattcgggacacaaagggacgcgagctggcctacaccattgtggaaaaagtagaccagaccgattatgtgcttggacaacacattgacctgaatccaagtcgcagagtgcatctgccggaacgggtatatcgcgccaaattgctggtggaactgcaagaggtcccagcaatgggctacacccagattgtttttgatttcagtcagggcgctgcacctgttattgagcggcgtaacggagacacgattgaaaatgaacatttcagcattgcgctacaagcaaacggcaccttgcaaattacagacaagcgatctggccaagtgtatgcggatcaaatggtctttgaagataacggggatgacggagattcctacaattattctccacccgagcgggatctgattatttcttcggcaggtagccagatgagtgcgactactacccaaacgtcagtatcccagacactgtccctgcgtttcactctggatgttccctacgatctggaagagcgcgccgcaggcatcacgtcggtttcactgccaatgcaggtgcagatatctcttcacaaaggagagaagctgatccgcttccaggttcaggtgcagaatgaagtgttcagccaccgtctgcgtgttctttttgatacaggaattgcttctgccttatccattgcagaccaaccgtttggtgtcattgctcgtccaacctcattgccagaagtggaggtatgggagcgcgaacaatggcaggagaaaccgatcaccattgaagcgatgcagagttatgccgggttgaacaacggttcgcatggtatggctgtgatgacggaaggtgtacgtgagtatgagattgttggtgagcaaatggataccattgccctgaccttgttccgcacattcggtttcatgggtaaggaaaatctgttgtatcgtcctggccgggcctccggtgagaaaattgtagcaacaccagacgcgcaattgcttggcgagctctcctttacctttggcctgcatatccagacttccgggttcgacgaagcgaatgtggcccgtgctgcacgtgaatatttgacaccgatcagcagttatcagctatgcgactttttgaacggacgtctgatctttgctttccgcgatgaggaacgtgttcttgatacagactacagcctgatgtcgttcagcgacgattccaacgtgatgttaagcagtttcaagaaagcagagcagagtgagggttacattgtacgtgtcttcaatccatatttggcgcagtctgcaaacgtgaacatacactttaatcaacctgtacatgcagagcgtgtatctcttggtgaacaacccctggagcctcagcagaggttaaccgagggagaagaggtcgttcgtttgccggaactcgcacattgcaaattaatgacggtacttgtatccatataagctgaactttagtttgacacaatcctgatcagaagggaggtcggatatcggtatgatttttccaactaaacggttgaaaaagctgttccacctcattcatggtgaaggacaggaacaggcttggacgagccaagcacttgcagacaagctggaggtaaccgtgcgtaccattcgggatgatctgaaaaagttggatcacatccttgcgggacacggcgggagcctggagtccaagcgtggacggggatattccattcgtgtgcatgatgcgaagcggtataatgagctgttggaggaacggaaggatgatcggcaaaaagatgcgccagtacctggatcgcctgatgagcgtatccgttatgaattgttcaagctgcttggtgaaccgggtcatatcaagatggaagacctcgctgatcagctgtatataagccgtgcaacgatgaacaatgatctgaaaatcattcgtcagattctggagaactaccagcttcagcttcagatcaagccaggacatggggtgaaggtcgtcggagacgagcaaaggttccgttattgccttgccgagtacgccgatgcgcgagatgaagaactgggaccggaaggcatgactgctgcacaggaacgtttgctgtatccaatcgaacccgcgcacatccgcgagatcgtcattcgccatgtaggcaaacaggatgttcgtattgcagatgtggcactgaaagatttgattacgcatctggctgttatggtactacgtattaagcagggacatgaactggaacgattcgagaaagtggaggcgaatgctcaggatcagcaacttgcacagcagattattcaggacttggagtcgttatattccattcattgtccagtcggagagcgagattatctgctgctgcacattgttagtaaaaaaatgaccgctaccgattggaatggactacgaagtgatccattatatgtggctgtgcagcagatgctgggtcatatctatgatcggtacacctatgatctgcgggatgatgaacgcttgccaaatgatctatatgcccatctgaaacccatgattacgcggttggaacatggcatgaatatgcggaatccactgctgggacatatacgcaaatattatccgctggcctatgagattacgatcagtgcagtgaaacagctacagacatatgtacctcatgaaatcaatgacagcgagattggttacctggctcttcatattggtgcagcattggaacgtaaataccagattcctcatcgcaaacggaaatccgtattgctggtctgtgggtcaggatacggcacagcccgaattcttgaatccagattgcgttcgttatttgccgagctggaggtctcacgtgtagtttcgctacgggagtacgaggagatggggagtgtgcccgaagatttggtcatttctacgatccggttacgggagtccaaaggcaagccgtcggctgtcattgctgcgattccatcggaacgagacatggcaacgatcactcatctggtgcgaaccagtgatgagcaggaggaaatgacattgctgcgttactttgatccagagttgtttatgtttcggtcggatcagcctgacaaaatgacacttatggctgagatgagcggagcactgttggagaagggaattgtaacggagcaattctggccagctgtgcaggagcgggaaaagatggcttcaaccgcgcttggaagaggtatggcgattccgcatcccatggagctgagttcaacccgtacgaccgtatcggtatacctgcttgagaagccgattccgtgggatgaggagaatgaagtacatgctgtatttatgttatctatctgcaaagaggattacgaacaggcgatggggatatatgatctgtttgtagaattgatccggcaggaggagcagctggaaagcctgcgatcctgtggcagcttcgatgcctttgctcaacttgtatgcgaaacgttgagtctaaaaagtaccgaagcgtattaatatataagtagttcactaaggataattcgactgacactccgatgacagaataaccttccgatcgctgttatccccagatttttctgatccccttttcgaaagggggaaatccgtggataaaggcgaacgctttgcttcttcaagttatttctgtcctctccgttatcgtgtaattgttaaagggaacatatatagatcagctcgttactatgtgaaactgaaccaacccaaaaaccgtccttcatcagatttgtctgataaaggacggtttttattcgtttacacaaactatagattaaatatgtttggaaatgatttcttccagtccttgagcgacagaatgcgcccctcgcgctagatgtctttcatacagatgcaggcggacaaaactttcatccgtgcccatcgcttccgagaatattccactgagcccacgagcgcggcgatcgatctgtaatagcagctccagcgaatcgcccatgggatagaacagcacttccaactcatccagatgcccacggaacttgtttgttggtacaaattcgaattcctgcacaaatggcagattgccacccagcttcggcgcatagtcattggttacttcacggagcttgaaaccaaggatatcaattgcatcgagcacggtgttcatgtctttgctaggaacaacatgcagtctgtcccggtctgaggggtctacagcacttgaaatatcgaggcccgtctccacccatacctctgcacgatgcagtgtaattggcagattttctgggaggtcaaatgaaaattctttctccaatttggctccaggctgtaatgtaaaaccttcggtgagcagatatttggctataacggctgtttcttttactttacgatcatcgtgctcccgtatgtaatgggttttgattgaaagatagattcgatctacgttctgttccacatctccaccttcaatgtacacaacccccgagatgattcctccaggcgtgacctctggtgtatgcaattccgtatttactttggctgctccaacacctacactggctaacattttcttgaaaaatgacatgcgctcaacctccagattagatggtttattatatgggatacatacggcttcgaccttaatacggaagctggaagagaagcgtttcatattttagcaaagatatatcgtatatccaaacaggagaatcgacgtacccatgtcgaatgtttaaataaagggaatttttgtcaggaggaactctatgagcatggaatggtacgatatgattgcacgacgtaatggggggtacaagggtagagctttgtatacgctggaaggttactctgctgaagatatttttgaagagcggttgattaagcttctgcctcagtatacatccgtgctcgatgcaggctgtggacatggggagtttacgttgaaaatgtcggaatataccgatcacattatagggtttgataattcggaagagatgataaagatagctcggaacagtcttcattcaagcaggataacaaatgtagaatttgtctgtgtcagcacaaaagaaaagatgccatttgaagataagcaatttggtctgatctatgatcgcagaggtccaacttccattattgatcatgggagattgctacaaaagggtggagttatgattggtattcatacggatataacaaaggtacgtgagcgtttggaaagaaatgcatttaaggagatcaagattgaggaatataacgaagcacttatgattttctcggatgaaaaagagtttgccatctttctctccgatatccccggaaacccggattattcacagcctgagtaccgggaacagctgaaagtcaagctgaaggagaaccaggttgatggtagaactgctgtaagagaatgcaagtatatttggcaggccataaggagatgaagccgattgaacacagaattttcagaacagaaatatggtgaaacgggtgtcaaaaccagctttgagcagatggcgaacggggaacaaaaatataaaatgataacagaagacggcagttattattgtagaaccgttgcctctttccagggagcatggcaaaacagtcatgtacatatcaatctaacggagttttatgtggtgcaaaccggatggatagcgtatgccagttatggagacgatcagatgttttcgattcgagtgatgcgtgcaggagagcacatcattgtccaacctggaatccaccataatatatacatgtctgcacatagcgcgatacataccatcaagcatggattgaatacatccagtgattggacggcatcccctgagttggataggttaactcaatctttaactgagaagaagctactccagaagtatgattaaccagaggggaggatcagacagatgcgtaaaagtacaatattttggattacgggaatagcgataattctcttggtgactctgctcatatacagctatgttattccaagtgtgagtgcccaggatgttgtgatggcaggcacaatcaggcagattgatacggatgtagttgaggtagagttagagataacgcgaaaaagagaagacaaggatcaacatatggtgtatcccgttgtccctggatgggaaggggtcacattcactgaagaacaagatgaagcgtggtacatgccttcgtctgttggcagctcctatcttgatcaagtcattctggaaaagtatctaaaggcgcaggggaagaccatgaaatcagctgataatctgataggatttgcgatacctgatgagatagggagctacaagttgcggttaacgctcagatctttggatggaacgactcagccgcttgagaatcccgtggtgtattatgttcacaacgagcatttgttagggaaggatctgagttgggttacgagtgagaatctggagatcaataaggagtaatcagaatgatgaatgtatatgaatcgaatgaaatcaccgtacgtttcttggacacagaagatgaacaacatctggtaaagtggctgtcagacccggaagttcttcaatactatgaagggcgtgatcggccgcatgatctggaacaggtgagagagcatttttacaatcagaaagatgatgctactcgttgtatcgttgagtatggaggacatccgattggatacattcagttctatgagcttgaggaagaagaacaaacggagtatggttatggagacacggatgagatcatctatggaacggatcagtttattggtgaggtagaatactggaataaaggcattggtacacagttgatgcagtccatgctggcttatctgattaatgaaaaacaagcccgtaaagtggttatggaccctcaatcctggaacttgcgagcgatatcctgttatgagaaatgtggtttccaaaagattaagctgttggagaaacatgagcagcacgaaggacagatgcgagactgttggcttatggaatatgccctgtagatcctgcttaaagttatttaaatcatgtaaacaaggaggaataatggatggatgaaagatttccgataggaccatttgtacacacgggtgaagttactttggcacagcgggagaagtggattcaggacattgctgagttgcctgaacacgcacgagaagcggtaaagggattgagtgaagagcaattaagtctaccgtatcgagaaggtgggtggatgctcaaacaggttattcaccacatggcagacagccatatgaacagtatgattcgtttcaagttggcgctgacagaggatacaccaacgattcggccttattatgaagagcgctgggctgaactgagtgattcaagagacctggatgtcgaattctcgcttcagattctggatgccctccatcgtcgttgggtgtttctgttaaacgcgctgacagatgcagattatgccaaacaattttatcatccctcatcggaagaaacgacaagactggattacaatctgggcatgtatgcttggcatggcaaacaccatgttgctcacatcacatcgcttcgggatagattgggaatatagctattagaaatatcttttaaggaggattcatcaatgagtgtacatatcagactattaaatgagaacgatcctgtaatcatatcaaaagcgtttcaggagcagggttgggggagatcccctgagcagtatcttcattacttggctgaacaacagaatggggaacgcgtaaccttggcagccgagttgaatggagaatttgccggatacgtgaatgtattgtggaattccagctacccgtctttcagggaacaaggcattcccgaaattaacgattttaatgtactaatgaagttccagcgccaaggtattggttcacggttgatggaccgagcagaggaagttattctggaacgaacggatgtagcaggcattggtgtaggtgtgttttccgattatggcaaagcgcaagttctatatgcccatcgcgggtacataccagacggtcacggtgtatacaaacatgatcattacattcagccgggtgaagaaacgattatggacgacgatgttgtactttatcttacgaagaagttaaaagccacgcaataatttcataatatatacaatatgaaagatgtcatgtatattagttgtaaatatctgttatgtgtgactggcgtaaacgtggagtgaaccacgagggagcacatatattatatgccgtacgcctgggcaaagtgtttgatcttttgatcaaacactttatttattattcagggaacgaaaggactggtggcggcaatgaaaatggcgtttgttttatttgatggaatgacaagcatggatttagctggattttatgaagctgtgacttggctagcgattctgaaagcaaaggaaaacgtatcatggacattctgcgcagataaggaggaaatttcggatgaccgtgggctgaaaatgaaatccgatgcagtattacctcatctaggggattttgacctagtattttttcctggtggattttcaactagaacgcttcgatttaatgaggattttatgcgatgggtccgaacggcagaaaatgtcacatataaaatatctatttgtaccggggctttactgttgggggcagcaggtttcctgaatggaaaaagggctactaccaactcatctgcttatgatttattgaatccttattgtgcagaagtaatctcagcgcgtgtagtgcgtgatggtaatacggtaacgggtgcgggggttacggcttccattgacctgggactatacttggtcgaaatgttaacgtctacggagatcgtccttcaagttcaacaaaaactagagtatccatattatgaagctggtaacttaaaagatgtctacatgcacactaagggtaggggataaaaagatgactattcgcctttttcaagcgattgatcagccagcggtgctgaaaatgatgacggatcatgattttcaattcccttcgtttatacgcgatcagtatcctgcacgctgggatttatttttaaaaatgacggatgaacgtatcagtgcttattatgtcatggttgacgaagcagatgttgtcataggtcatgctggttatatctttcagcctactgttaaccgatatgaaatcgttggcgttgttacatgcaaatcacaccttcgacagggagtagcacgtggactaattacaaaaatatgtataaaaatagctgaattcggcagtggtgatgtcatgctttacacacttgatcatgaagaaaatgaagcagcgctcgtattttatgaacgaatgaattttcaaaaagaaggtgttgatatgaattattatacctcggggtttcatagactttcgcttgttaaaacattataagggaacttcaaaaaactaattgtagtggaagcataaaagtgtacttcagtttaagttgcatgtacttgcaaagaaagatgatcaaaaagctgtcctgcatgttatactctattggaatttgaggaatgataagcaggatgttaagagattagatgatcagaggagtgaatgatgcatgtttagcaaagtcggccagattatgttgtatgtcaacaatcaggatgaatcactggcattttggacggaagttgcaggattccacattgtggatgaagtaaaccttgacgagggcatgagatggattgagattgcgcctaccgcagactcgcagacaagcattatactccatgacaaagagttcgttgaacggatgtcggcgggtgtaaatctgggcacaccttcgttaatgttcttcaccgaaaatctggatcagttatatgccgacttggctggtaaacatgtaacggtcggagagattgtcgagatgctaacggggcgtgtcttcaactttgctgataacgaagggaattactttgcagttttggaacgggcgaagtaagttacaacttaaaacagcaccattgcaagcggtcgacattcatgtcggtcgtttttttgttgggaaaaagcttatgttttggagtagaaaaacgcaagaaaaatagagaactactgggtaaaaatgttataatagagtgtggctgatttaacgaaaatgccgaggaatgaatagtcgaaaatgaaggtttgaatggagcagttaaggaggaatgtggttgtggaaaagacgattaaaagtgtacaggatctatatgatatgctcgatgcggatttcagatctgccaagcagttttgggaacctttctatgaggatcggaacagaccaatcccctttttcccaaacaaaccggatgagaatctggtagcgcatgtgaacgaaggtgtgctgagcggcggcaaggcactggaactggggtgtggcccgggcagaaatgcgttgtatttaacccgccaaggatatcaggtagatgcttatgatctttcggagacagctattgcttgggctaaagagagggcggcagaggagcaactggacgtgcattttgaatgtcgatctgtgttcgaattgtccccagagcaagaatatgatcttgtctacgactcgggttgtctgcaccatctgttgccacatcagcgcattccctacatagagatgatccacaatgcactccggcctggaggatactttggaatgacttgttttgctcctggttttggcgatattggtgggcctgagatcgttatgaatgattggcaggtgtatcaagagaagtcgatgcgcggtggtcttgcgttcacggaggagaagcttcgctacatgctggaagatggctttgaatgtgtggagttccgtgcaatgaagtcgctggagcaacatgaaccgtattttggtgtaccttttctctgggccacgttgtggagaaagaaaaactcgtaagaatagtgaaataaacatgcattgaaaatagaggaggagtggtatcggaatgggaacagaaacaggaaaaagacactttatcattacaggcacatccaaagggatcggtttacaacttgcagagttattattggttaagggggattacgtttacggtatttcacgcgggggttcggatctgttggaatcaagcgaggaatggagcgggcgttaccgccatgttcagtatgatcttgccgacctgaatgggatcgatgatttgattacacgcatattggaccaaattccgtctcaggaagccgatttcattggacttattaataacgcagcgatgctagagcctctaaaacctatcgatcagtgcagtgcggcagagataagtcaaagtctcaacatcagtctcgcagcaccaatgatattgagttcatcttttattcaacaaacaaatcatctgtccgccagacgtaaaattgttaatctctcatctggttcgggaagttatcccgcgccttcaatggcagtgtactgtacatcgaaggcagggatgaacatgttcacccaatgcgtatctttggaacaaacgggtcaacagaaccctgttgagattattgcttttgatccggggatggtcgatacggaattgcaggctgttgcacgaggcaaaagtgcagaggagttcgcccttgcgggtatgttcaatcaagtatatgaagcaggacaattaagatcgccacgagacgtagcgatgcagttgatcgagcggttggacgaaaacagtgatgcaagccatgttatacacactattgagagctaataggatatacgtatttcggcttgttatctttacgaagtatggataccttttgatataagcccaacttccctgtacactggaatcagcgatcggaagaacgattcgtaacggtaaaggtgatcctgcaacaacggagtctatttaccttattcaaccttagaagatcagaaacgtggtgaatctcttgtttaaaattatgctcattgaagacgacgaatcgttattcagtgaaatcaaggaacgtttgtcccaatggtcgtatgatgtgtatggtgtgcaggattttggaaaggtattgcaggagtacagcgtaattcagccgcaactggtcattattgatattcaattaccacaatatgacgggttccattggtgccggatcattcgttcgcactccaatgtgccgattatctttttgtcctcacgggatcatcctgcggatatggttatgtccatgcatttgggtgcagacgattttatccagaagccttttcacttcgatgtattgattgccaagatccaagcgactttgcggagggtgtataactataatacagagcatattgaactccgaacttggcgcggtgcggctattgaatatgtgaaaaatacactgacctgcggggatgaatctgtcctgttgaccaaaaacgaaatgttcatccttaaagtgctggtcgagcacaaaaatcagattgttacccgtgaggacctcatccggagcttgtgggatcatgagcatttcgtgagtgacaatacgctaacggttaacgttaatcggttacggaagaaacttgaacccatcggcttggagcggtacattgaaaccaaagtagggcaggggtacatggcaacggaagaggcagaagcgtgatcggaaagtacatacgagaaagggctagttggttatggctactggtaagcatgcaacttattattttattggtggcctacctggactcgtccattccattccaatctgtgatgtatatcgtaggactgaatgtggtggtatgccttgtttttatctgggcgagatacctgaaagagacccgtttctataaaaaattgagcatctgggatcatacctatgatctgggagaactcgatatcgccgaaagtccatatgagcagattgtacatgaggccgtcagttcccagacacagcggtatcgtaaggagtcgtcacatcattttatcgctctggaacaggagaaggacgagatgttgtcctggattcatgaggtgaagaccccactgacagcgttgcaactgatgatcgagcgcttgccagatgacaagttacagagccaaatgacatatgaatggttacgaattcatcagttgctggatcagcagcttcaccagaagcgtattccgtttatgcataatgatctgttcatcgaagagacggaacttgaaccggtattgaatagcgagatacgagcactgaaatcgtggtgcatctccaaaggcattggctttgatgtgtctttaatggtatcgcgcgtgctcacagacagcaaatggttaggcttcatcctccggcagttgttgagcaatgcggtgaaatatagcgattcatcggacatcctcattgaaagtcgggaacaggatggacacatcatactcatgattcaggatcacgggcgagggattgagactcaagatctgccgcgtatatttgataaaggatttacgtctacccgaggcagaatggatggagcggctaccgggatggggctgtatctggttcgtcaggtggtccagacgcttcatgtgaacattcatgtagaatcttctcttggcgagggcacaaccgtcacacttacttttccgcgaaaaaacgacatggtgcatcttgcaggcgtgtgacaacaatgtcacatgctttttggttttgttcggtgaatcacacgataacactgcacatcccgattatgatatagacacgagcattttgcagaagatctaagaggagtgagcgggatatgtggatactggaagccaaaaaaattcataaagtctatggtaataaattaaataaacaggaagtgctgaagggaatagatcttggggtaagcaagggagagtttgttggtattatggggccttcgggttcgggtaaaacaacgctgcttaatgtactttcctccatcgatcgggtgagccagggcacgattgatattgagggcaaggaattcaccggaatgaaggagaaacagctggctgagttccgcaaacatcatctgggctttatttttcaggaatataatctgctggatacccttacggtaaaggaaaatgtattattaccgctctcgatcacgagcattccaaagcaggaggcacaccggaagtttgaacagatcgcccgtgaactgggaatctacgaattgaaagacaagtatccatctgagatttcagggggtcagaagcagcggacttcggcagcacgagcatttgtccacgagccgagtatcatttttgcggatgagccgacaggagcgctggattccaagtccgcttcggatctgctcggcaagttaagtgatatgaacagcgcacgaaaagcgaccattattatggttacccatgatccggttgccgcaagttattgccgcagagtgatcttcattcgtgacggtcagatcaacacccagctgaataaaggagacgagtcacggcaatcgttcttcaacgatattatcaaaacccaaggcgtattgggtggtgtacagcaatgagcttgaattatattattttccgcaatctcaggaaaaatctaaagaattattatctctatgtatttgcgcttgtgttcagtgtggcattgtatttttcctttgtgacgttacagtatgatccttccatggatgaggtagctgcttcaacaaaaggtgcggcggctataggcgcatcttcggtactgttaatcgtcattgttggtatctttttgctctatgccaatacgatctttatcaagcggcgtagcaaagagattggattatttcaattgatcggactgacgaaaggcagaatttttggtattttgagtgcggagaacagtattctttattttggctccatggctatcggtgtgttaattgggtttcttgcgtccaagctggtattgatgatattgttcaaaattctcggtgtggatgcgattacgaaattgtatttctctccgatggcactgatgcaaacggtgattgtttttacgataatgtatttgcttatcatgctgatgaactacacttttatcaagagacagagtattctctcgctctttcgggtgtcggcgactacggagcagcaggtgcagaagatgtctgtcggacagatgattattggcgtcttgggtattgctctgattgtgtatggatactacatgtctgcacggctgttcagcggagaggcaatgggtatgcagcagttgatgtatacgatgatcctgattctcttctcggtcatactggggacatacctgttctataagggttcggtaagttttatctttaatctgattcgcaaaagcaaaaacggctacctatccattcatgaggtgttgtctttatcttcaatcatgttccgcatgaaatctaatgcattgttactcacgattattacaaccgtatctgcacttgctattggcatgctgtcactcagttacatttcgtattattcggcagaggctcaggcgaaggaaagcttgccggaggatttttcatttgctcaggttgaggtgaaaaatcgctttgtaacggagttggaacataaacagattccatatgaggagaatcatagacagcctatttatattgaaattgatgctcatgaagtgatggacgagtccatgacggaaaagtacctgttcagtagtgtgttgagtgacaacatggtagataacatagatctgcaaccaggtgaagtgatcttcatgggatacggaaatgccattcagcagttgatttccattgaggagaaaggtccgatcgtcttgcatggattgaagcatacactggaccaccagctgatcggaaccacccaaaagggggttcttcctggatactattctgggggcacgcctgtagcggtagtagatgaaacggtataccagcagttgcggcaggatctcgatcccgagctgcaaaaatccgagtgggcggattactatggtgtacgtattctgaatgaggggcaggctgaagaggcatatgccgtatataaggagctacagttggaagcaccgagcttctcccagattgagttcagaaataaccaacgtaacaatatgggactgattatgttcattgttggtttccttggtttgacgttcttgattacatcgggatgtatcctgtactttaaacaaatgaatgagagtgaagaggaaaagggcaattataccattcttcgtaaacttggatttacacagagcaatctgttgaggggaattcagatcaagcagttgtttaactttggtattccgcttgtggtggggttgagtcatagttactttgccgtgaaatcaggttggtttttctttggtacggagctggcgacacctacggtcattgtcatgatagtttatacattgttatattcgatctttggtctgttgtctgtgtggtactataaacgggtgattaaggaagctttgtaaaattgggatcaggagtatgctgatatagcaaaaataggttgagtaaagggcagctgtattgtttacagactgctcttttttctttttctaactataatgcctcatgaaaaaaaggatgattatggaattgagtcgaaatgatgatagagtccatgcttctgattcatgtataacggtgaaacgaggggagtggagtagcgtgcctggagttctatatgcctcgaagaaagagttaagtgagacgattcgaagcacctatgaattgttcgagggtgaattcaatgacatccataacagcgacaaagataagtgggttgaaggtgtggataagacgcctgcccagatgatcgcgtaccagctgggatggatgaacctggtgatggattgggagcgaaatgaacagttgggacatgaaagtcatatgccgacaccaggatataaatggaaccaactggggtcattaaatgaatcattttacgaaaaatattcaagttatacgctggaggagctacgctctttgtttcgggagacagaacaacaatggcagaactggattgacacccttagtgaagaggacttatttgtacaagggatgagacagtggacgggaacaaagcccaggtgggctatggtgaaatggatccagattaattcggtagctccttttaaatcctttcgtacccgaatacgtaaatggaaaaaaggtcacttagccaacatggatgaggggagaatgggtgtctaatgaatctggcaaataaaatcacgttggctagaatcgcgttgattccattgtttatgatctgttttctcaatcagcaaagcgtgatgattgcactaattatttttgcagtagcagcaggtacggataaattggatggatatgtggcgagaaaatataatcagatcacgaatctgggaaagttgcttgatccactggcggataaactgttgattgcggtagcgctgatcatgatggttcaggagaatatgatcagttcatggattgctgtaatcattataggacgtgaaattgtcattactgcattgcgaatggtagccacagaacagggtattgctcttgcagctgatcgttatggaaaaatcaaaatggtgcttcaggtggcagccatcattgccattttgttgaataatgttccgtttagtttgctgactgatatcagagtggatgtggcattactatggggtgcaacaggcgttactctcttatccggaatgaattacattatcgtaaattataaactgttgagataaaaggagtgattaggagatgtcccaaataaatattaatccaagtacttcagaggattcagagtatgttcgccagcaacttatcgcatttaatgctgcacatgtgagcgaggaattaaggcatcggtacgaagaattgaatttcaatatcaaaaatgagaccggcgagattgttgcaggtgtgcttagtacactttgctggaactggctggaggttgatatcctttgggtggattctgaacaacggcatcgggggtatggttcacagttgttgcttgaagttgagcgaattgcgcgagagaaatcttgtgattttgtcatgttgaacactttctcctatcaagcaccggaattttacaagaaacatggctaccaattgatcacaacgatcgagaatgcaccgactggacacagtcattattattttaagaaggacctcacttaagacagacaaagcatgcgaaataggaaaaatcaggagggttatgatggttaccattaaaggaatcgaacttgaagatttaccggcactaagccagctatacaatgagttgatgggaatgcctaccaatgaacagcagatgaaaaagatgtttcattacatacaacagaatggtcattatcatgtgcttggggcattttacaatggcaagctggttgggtccgttatgggggttgagtgtatggatctggtggggccatgcaaaccgttcatggttgtggagaatgtgattgtatcggatcaggtacgcaggcagggcattgggcagaggttaatgctccagattgagcggattgcaaaagatatgggttgtggttacatgattctggtgtctggcgatcagcgtaaggaagcacatatattttatgagaagttaggtttcaaggatgagaaggttcagggttatcggaagcatctttaacacgcacttcaagagaaaatttcttacacaagtggaaggattacttaaggaacatggcgaataaggcatagtcttaacaaaagaaacaaataagagggaggcactctcgtgttcaaaaaatgggctaatgttttcatggttctgagcctggtattcgccgtatgttccccaacctcctatgcttccgccaaaacggttaaggtaaccgttacgctggtgagcgcagagcttgtcgagaataactctgtcggtaatgagtgggccatcggagcaagtgtgaacggcaaagatctggaggagggttcgtcagtcactttaaacctgaaatccacgggtacattgaaactggaggccatcgccgaagaacaggacaaaattcccgattacggggataaaagcaccaacgtcaaactatcttcgttctccaaatcaaccaacaagacactttccgtggtggtgaccgagaacagaggccgatattctggtaacacagcgacttgggcgttcaagtttaagattagcaagaagtgaataggaaccaaccgtgagaaaagggagcctagctctctttttttaatgcgtagataattggtgatctaaagaaagagagcatttcgagccacgctgatctttgttaaactaatgagaacaacagtatagaaataaaagatgtattttcaaaaaaaagtacataggaggttaacacaattatgcgtatcgtagataacattaaagtctggggggagccgctggagaacgccgtaagtcaggcggtgacttgctcgcaatatggagatgtattgggtgtggctctaatggccgaccatcacaaaggttattcgcaacccatcggtggtgttgtcgcttatcggaatatgatcagcccgtcaggtgtcggatatgatattgcctgtggcaacaaggctgtgcgtacaaatctgatgtgggaagatattcgggatcagattgtaacgatcatggatgacatcaattcgaccatttctttcggcgtgggtcgtaacaatccaacacccgtggatcatgagctgttcgacgacgcgagctggaagctgtttgataccattgaaccgggattacaacataagctgaagacacttgcacgcaaccaactcggaaccgtaggcagtggcaatcattttgtggatatttttgtagaagaggcaacggggaaggtgtggatcgcgaatcattttggcagccgcgggttcggtcacaaagtggcgagtgggttccttaaccttgccgcagggcgtcagttcagtggcaaagcgccgggcgaatcgatggatcaaccgcctacgttgtttgacctgaacagcgaaatgggtgatatgtattgggatggaatgactttggcgggcagatacgcctatgcagggcgtgattatgtcattgaacaggtactcggaattctcggggcaagtgctgaatataccgttcataaccatcacaactttgcctggaaggaacaacacatgggtgaagaggtagttgtggtccgcaaaggtgcaacgccactggcacccgggcaactcggttttgttggaggcagtatgggtgatatctcggtaattgtggaggggatccacagcgaggagaataccgagtcattccgcagcaccgtacatggggcagggcgcacgatgagccgaacccaggcggctggcaaaatgaattacaagctgcgcacacgtatgggtggcgagattagcgaagcacagatgcatgaggcgattcgtgcctatggcgtggagctgcggggagcgggcacagacgaaagtccgtttgtgtacaagaaactgcaagacgtgctggacgcacatgcaaatacgctgaagatcaaccatgtgctgcgtcccgttggtgtcgccatggccggaggtaatgaattcgatccgtataaggattagtcatatatgttcaactgaacatttacacgataagggagagggcagaaataacttgaagaagcggagcgttcgcctaaaagctttctaaaagaaagctacatcggaagcatacgctatcaccggatttcccctttccaaaaaaaggaataaaaaatctggggataacagcgatcggaaagttattctgccatcggagtgccagtgtaaatattcattagttgaactatatatagagagggtgaacttcatgaggaattgtgcgatatatagctctcagtttgacctggatcagctgtttgaattgattcaatccatttatcctgagggtacgattgaacgccgggaagacaagacccatattcaagtgactcagaaaaaatggctcagtaagaaaaccaaaggctttaatatcatgaccagccagacacatcctgaggaatttacgacaatgattcaggggatgcttggatttttgggtcagattaaagggcgcaatgcttcgctacaggaaaaggtattgatcaaatgttccacattgaacatggtggttggtattgagacggaagaggatatctcggaagaattcttcggcgagttattacggttggctgatgcgctggatgctgttatcttctggggaggtggatctctgctgaacgcacaaggtaagctattgctggatgtgaatggagaatctgaggtagaggattacacggtgacagcgcacaccagtttccttgacggtgacagcccccagtcggagtctggcattcaacgtaaagcgcgttcagagcaactgttgactgaacaaggcattccgtataatgcgcacttgcccgcaagggccggagatgagcacaccacgattcggagtaaagaggaagttgcgcgccgtgcggttgccctatgtcttgccgcgcttaagggtgagtgtctgggagccggcgaaagtgcggatgataccgcagcactggttcaggaagtgatcgacaagtatgaggctgactcctttttctcacccgtagagaagaggtttatcgaccagtacggagcagagcagcaggagattatttccttctcctggggatatgaagcctaccacgtaatgttatgggcgcttggttatgtgaaggaactgggtgcaccaacggagttgtgtaacgtagggaaggatgtcggttatttgcaacagaaggatagttttaccgactttctctccgatgcatctctgcgtaacaagagcgagattctggatgaagcagatctgatctaccgttataactgggtgtgcgtggatagtcgtgtgaatgacaaaacacctccagctggcctgaatggtggagtggcttatgaacgtcaccgtgcattgaactggctgatctgttatctggatctggcgtgggatgatgtgcgtacagatacgtagaacgggatgatgtgacggcctattgtaaataaacaataaacattacacaacatacaacaatgcaaatacccctttagccgcacaaatacggttaaagggtatttgatattctgccatattacccactatgtctgccaaactgttcacggataatgacgtcagcaagaattaattttttctcgacgttgctctctggattcgcaatgcgccataacatctgatccactgcacgcgcaccgagcaactccttgttcacattaactgtggcaagtaatgggatattgtcgtatagattatcaaatcccgtgacaacacactgatcgggtacacgaatacccatactctcaagggcttctatggtgtatagcccatagaaatcattcgcacatacaaacacttcaggcaggttatcctcactgatcaccgaagtgaacgtctggcggaactcatccaatgcctgattactcagctcgggaatctgatgtatttccatcccatgacccataagcacagaagtatacgcaatccagcgttcatagaagctatgagcatccccgatattgccaacgaactggaatgttttgaaacccttgcggagcaaatagagcatgatctctcgcatggatgcgaagttatcggtgaatatgctgtcactgtgaaaaacagggtccagatgatccaccatcacaaccggaatactgagacgcttgatttcaagcagaatcggggtagagatagagccaacggtaatgattcctcgaatggcatctgggttgagcagggtaaatagctggtctgctgagggttccgtcaaggtcagaatattaatccctttttggttcagcttggaagagatcccgttaaagacggggccccagtatacggagtcttgattttggtaccgaacattggggaacaaaatcaagatcgttccgcttgaacgtgtgttctttggttcctgaagttcatggctgttatacagttcaccagacaacatgctgttatctttgaaatatccaagtttgccagcggccttgagaatgacatctctcgtttgatcgctaactcccgattttccagacaaagctcgtgacaccgcgaatttcgacaaacccgtaaaatgtgcaatctcctgaattgttacctttgtcttcatcataccatccttacactcgtagttctgccgtattccttatttggagcgatatccaactgatcccggggcgtatcttataactccgaaaggagcagattttgccgaattttcgttccaggccaggaactttttcgcaggcgtaccggggtacgtcaagagaaagtgacgcagcagggggcgaaaaggcggtgaaagatgcccttaagtgagatttaagacacgccctagtataacatgatgtatttctcttaatctaataacggacagagaattcaaaatgttagtgatgcacagtattttaggatgaacgttcaacgtgacggtaagcatattttcagatagtatgacgaaatttgtctgatgaattattattttgttattttttaaaaataacaaaataaacaaagttagaatcatggtttaatatgtttgtacttagagtccaggatattgaataagctgtgatacaggtatactacagcttaatcagcattttatcagagaaattagaaaatgttaacaacaaaaatgttgacgcttacattttgctgtgttaaattttgtttgtcaaaagcaaacaaagaaataacaaatggtggtggttttttattttcgattggttgatgaatggggttaacgatttggggtgaaccatgattggtatacacattcggggaggttgttaaaatcatgatgagaagatggaatgttctacctctgatgttattggctgtgatgctttttgtatccgcttgcagtggtggggggacagcgcagacggggaccgaagcagagggaacaacgaactcaggtaacagcactgaggtcgctgagacagagaaagagggcgaagcggaagaagctgtggttaatgtgcctgatctgggtgggcgtgtcatcaaggtcgcggcctggtgggacttgaaaccggcgggagagacggcctccgataaggccagacttgataaaattgcagaggttgagaagaaatacaacgtgaaactggagtttgttaacgtaccttttgaagaatacatgaacaaattcacaacgtctgcactggctggcgaaccgttcgccgacatcgttcagatggagtacaaatccgcactacccgccatcctcaaagggcaactattgcccatctccgaattcactacacctgagaataacatcaaccaagaggctaacctgattgcaaaatttcctgccattgcaggcaacgaatatgccttcgaatctccaaccagcattggtctgggacttcactataaccgtgacttgttcaaaaaattatctttgcctgatcctcaagaactgtataacgaaggcaaatgggattgggacaaattcatggaacttgccaaacaggcaaccaaagataccaataacgacggcaaaactgacgtatacggattttctggctgggcgcttgatgtcgttcgtcattttaccgcagccaatggtggaacgatcgtggatgataccaatagcaaagaaggattgtccgatccgaaaacgattgaagctgccgaattcgtcaaacgcctgtataacgtggagaatgtcgtgaaggtcaaaaccggcgacaaaaccaattgggaggaaagcaatacgttcaaagatggagatgtagctcttttcactgctgctgaatggcagttgggcgatctcacttttgcggttggtgttgtgccgattccgaacgggccacagggtagcaaagaggtaacgtatgcaaacaacgcagcatcagcgaagttcattcctaaaggtgtggaagatccaaagatcgtctaccaaatctatgaagagaccttcgacatcccgcagattgaagagtatccaggtcaagattatctggagagtcgttataccgacgagaaggatattgcgatcattcgcgagcacatcgctggaaccggccgcatcttgctggatgatgcctacacaggataccctttcggggattatgtgaacgatatcatcaaaaacaatgcttccgtgacagcaacagccgagaaatacaaagcacaggcacaagctgccattgataaactcggcaaacaataacaacacttatcaccagcaaacgattcaggcagggggctcgtgtcggcaatgttgcacggagccccttttcctgaaccaccaaatcggcattgctggcatcagccttgatgaggaggactcgtaggatggctggaattctacaacgtaagacatggatattgtccacagtaatcatcgtggcggcagcctgcatcattctatatgtaacttccggcgctgatggaaagagtgcagacgttccacctggcagtctgcctgccattgaagtggatgcagtcttgcagcagacccggcagaaaaagggatacgaacagtatcgatccggaacggatcaggctacacagccgaatgtggacatcaccattgaagcaggagattacataaaagccgaaggtgaagacgtccgcaaactgactaattatgagggaatggacggtgtatctctccataccggagagaccggacaagtcgattggacgattaatgtgccggagaccgggctgtataacctgtccgcaatctattttcccgtagaaggcaagagttcagccattgagcgtgcattatacattgatggtgaacttccttttgcggaagccgcctatttgcagtttgaccgggtgtgggccaatgagaaagatgttgtggagcaggacaatcaaggcaatgacctacgcccgagacaagtggagcaaccacgctggatggaagaaacgtttcaggactccgacgggtacgaacaggctccattcaagttttatttggaaaaaggggaacacacgctaacgctaaaatcatcgcgtgaaccgatggtgattcggtccattcgtcttttcaatgagaagacagctgttccttacgcggagactgcgggtgcacaacaatcggattcttctggacaaccgaaggatgtagttattcgcattgaaggagaagccgcgattgccaaatcttcacctacgttatacccgaccagcgaaaggtcaagttctgctgtatctccttatagcgcttcccaggtacgcatcaatacgattggcggctttaactggcgtctgccaggacaatggattgaatgggaagtggatgtgccagagagcgggctttatcatatcggttttaccgcacagcagaatttcgtcaaaggtatctattctacacgcaaactgaccatcgatggtgaagttccgtttgcagagatggcgaaagcccctttccgttatcagagtgactaccgcattgacgtcatgggaggcaaggaagcatacaagtttcacttggacaaaggaaaacatttgctgcggctggagaacagcctcggggattttgcaccccttatccgcaatgtggaggacagtctgtacaacttgaactccatgtaccgacgcattctgatgattacaggcacgaagcctgatgaattccgggattaccgggtggagaaacagatcccgaacctgctggaagtattcagcggagaaagtaaacgcctcaaggacgtggctgcacagcttcgtcttctgtcaggacagtccagcgatcaggaagcactgattaagacgatggcgctgcaactggacgagatgattgacaagccagatactattccaagacggcttgcggcttataaaacaaatacaggcggtctcggcacatgggtgcagcaggcacgagagcagccccttgaaatcgatgcactgtacgtcacttcgatcgaccgtgatattcctggaacaggtatggggccacttgctaagcttggtcatgaagcaaagatattctatcattcgttcttcattgattataaccagattggtaatgtagctacatctgaagatcagcgtacggtaaccgtctggattggtagcggacgtgatcaggcgaatacgatgaaagcgatgattgacaagaccttcacaccagacagtggtatcaatgtcaatctgaagctggtgaatatgggaaccttgctgccagcgactttgtccggtgaaggaccggatgtagcgatgcagatcggcaatgatctgccggtgaactttgcgatgcggaactcggctgtagatctgacgcaattcagtgattatagcaccgtggaacaggagttcagggaaagtgcaatcgtgccgtatgcctatgattcaggcgtatatgccctgccggaaacgcaaacttttaacatgctgttttatcgtaaagacgtgctcgaagaactcggacttgaagtgcctcagaactgggaagatgtcgaagctctgctcgcgattctgagcaaaaatcatatggaatttggtatgccgattgtgacccaagcgaatatgcagggtgtcaatattccgccgaactctcagtatgccacgatgctgcttcagaacggcggcgccttctatcgtaacgatgacaaggagtcggatctggattcaaggatcggaattgagacgttcaagcagtggacggagttctataccgattacaagttagagcgggaatatgattttgccaaccgtttccggacaggacagatgcctatcggactaacggattacaccatgtacaaccaattgtccgtatttgcaccggagattcgcggactatggggattcgttcctgtcccgggaaccgttcaggcggatggaaccttgaatcgggatgtaccgggtggaggcagcgcggtcatgatgctggagagtgccaaggatcaagatgcggcgtgggagttcatgaagtggtggaccagtacaccgattcaggcggaattcggacgggagatggaaggactgatgggtgccgctgcccggtatccaacggccaacatcaaggcgctggattccctgccgtggcctgcggaggattacgccaatctcaaggcacaattcgaaacggtgaagggcattcctgaagtacccggtggttattttacaggccgccatctgttcaatgcattttacaaaaccgttgttggccaagtggaagccagggaatccatcatggattatacccaatatattcaggacgagattcgagtcaaacgtaatgaatttggtcttccgtaagcagagggagggttaatcgtgccacaaatatcactccgagacggacaaaacagtcctcctgagaaagcgtcaaggatgggcatgaaatcgtggtggagctggaagctccaggaaatgaaggccagcaaacattcctatgtcctgcttgcaccttatatgctcctgttcctcatgtttaccgtgattccggttgtcatctcgatcatactcagcttcacctactttaacatgctggaattcccgcgttttattggctggcagaactatactcgcctgtttctggaggatgatgtattcctgattgcaatcaagaatacgttgctgtttgccatcattaccgggccgatcagttatattgcttgctttgtcttcgcgtggatcattaatgagttaacaccgaaatggagagcgttcatgacgctgatcttctacgcgccctccatctcgggcaatgtgtattttatctggctgatgattttctcgggagatcgttatggtattgccaatgggctgttgatcaaatggggttttctgctggagccaatccaatggctgaagacggaagcctacattatgcctattctcattctcgtgcagctatggctgagtctcggaaccggatttctggcgtttatcgctggtttgcagacggtggaccggacattgtacgaagcgggagcggtggatgggatcaaaaatcgctggcaggaactatggtacattaccctgccttcgatgcgtccacagttgatgttcggcgcagtcattcagctgacaacctcgtttgccgtggccgatgtgtcgatcgcgctggccgggttcccaagtgtgaactatgcggcagagactgtggtgacccatttgatcgactttggtactacgcggtttgagatgggatatgcatcggcgattgccaccgtgctgttcatgattatggtgggcaccaacttgctggtacagaaactgcttcgaagggtgggagaatagctatggctgcaattgcgacaggcaaaaaacgcgtgaatcgttcgctatcgggaagcctctccctgtttgcccttctgctcgtttttggtgccttcatggtgctgccgttgatctatgcgatcaacaatgcatttaaaccattggatgagatttttacctttccaccaacgctgtttgtcaaaaatcccacgttcagcaactttacagatctgctgaatctgctgagtgactcgtgggtgccgttctcacgttatatattcaacacggtatttattacaggcatcggtatcgtaggccatgtactgctagcttccgcagcggcgtacccacttgccaaacacaagtttccgggcaaagtattcatgttccaagtggtcgtactgtcactgatgttcacacctgcggtaacggcaattccaaactatatgatcatgtcatggctcggatggatcgacacgtactgggctgttattattccggcatttgcctattcactcgggttgtatctgatgaaacagttcatggagcagatcccggatgcactgctggaagcagccaagattgacggtgccagtgaataccgaatcttctggtccattgtcatgcccaatgtgaaaccagcctggcttacattgatcatactgctgttccagatgttatggggcagtgatggcaatgggtacatctacagcgagcagctcaagaccctgcattatgcagcaggtcagattattcagggcggaatatcccgggcaggagcgggtgctgcggtagcactgattttgatgagtgtgccgatcacgctatttattttctctcagagccgaatcattgagacgatggcgagctcgggcatgaaggattaagggggaacgatatggcacgcacagtgaaaagatggcttgttctcctggcggcagtatctctgctgctggtgaatgccgtgcctgcggcggcctccccggcgccgtatgagagttataactacaactactggaaagaggctgtaccttcaccagatgcctatctgcccgagcgtaccatatcaggccgtgatctcggcattagtgagtttaaagaccctggtgatgtgaatgtttcaccttccgggttgatctatattttggatagtggcaacagccgaattgttgtattggacccagactttaagctgctgcgcgtcattgatggattcatgatggatggtagcaaggagacctttaaccttccgggcggattattcgtggatgaacaagaacgcatatacgtcgccgatacaggcaacggtcgtgtggttgtcctggatggagaggggacgctgattcaaaccatcacgaagcccgagtcggatatcctatcgacccaattccagtttcagcccttgaagctgacggttgaccatgtaggccgagtgtacgttgtggcgcaaggggtctacgaaggtatcatgcagtttgacgagagtgggaaatttatcggatacgtcggtacgaacaaagtggagcgggactacggcgaatatatctggcgcatgttatccaccaaagcccagcgtgcacaaatggtcctgtttgtcccaacggagttctccaatgcagatatcgaccacaaaggatttgtgtatgcaacgaatattgatcccggctcgaatgaaccgattaagcggcttaacccgtctggtgaagatgtactgaaacggtttggttattacgatgtcaaaggtgatatccggttccgcaacaatccgggtccatccaaactgatcgatgtgaaagtgctgggcgacggcatgtacagtgtattggatgcgacacagaaccgggtgttcacgtacgacgatgaaggtcatctgctctacatatacggtggcaaaggaaatcaggtgggcacgctcaaaacacctgtcgcgattgaacaatcaggtgagcatcacttggttctggatcggggcaagaacaaccttgttgtctatgagccaacccgttttggtgcccgtgtgaatgaagcggtggcactccactatcggggcgaggacacggaagccgtgaatatatggcgagaagtgctgaagctgaatgccaactatgacatcgcctatattggtatcggcaagtccttattaatggagaagaaaaacgaggaagcgctaggttactttgaacttgggatggatcgcaagagttattctgtggcgttcaagaggcatcggcgggagatgatgaaggaacattttggtacattcctgaccgctgtaatcgcgctgattgtcattctgatcctgacccgggtgacggttaaatggaaacggaggaggcaggttgatcgtgaagcaggatttcattaagtttccgctgcatctcatttttcaccccattgatgcattctgggacctcaagtcagataaccggggacggctgtttgttgcttttgcagcattggcgcttaccattgttatgatgattttgcaaaagcagtacgcaggatttctcgttaattacatcgatcctcgtaggattaacagcatcatcgaaatccccacggttgcagtacctttctttctatggtgcatggccaactgggcggtaacaactttgatggaaggggaaggcaagttcaaggaaatcgttctggcgacaggttactcgctcattccggttattctgatctatgccccaatgatcgtgatcagccgttttatggtgcaggaggagactgctttttattatctgttcaatagtattgcgttcttctggtttgtactgcttctgttcattggcatgatgacggtacaccagtacacggtgattagaacaatcattacgatggtgctgacgctcattgtgatgggcattatcgtattccttggcgcactggtcttcagcatgctgcaacagctgtatgaattcggttataacatttaccgcgagttgatttttcggacctaaaggaggcggcatccgtgaacaaaaggcaacgattatatacggtgctggctggtggtgcagctgtaatcatgattgcagccgggctgctgtatataaacaacaggggagttcctgccgtagaagccgcggcttatctggatacgacaaccaaagccatgcccgtcacggaggaaccattgcagttccttagcgactcctcgcagggtgtgtctggtatgcaactggtcgctgaagatcagagactcgccctgtattataacgaggagaccacggaaattgcagtacgtgacgggacaagcggagagatctggtacagcaacccgaaagaacgggctgaggacggtcttgcttccgcttatgaaaaagaggtgctgtcctcccagttgaatgtgtctttccgggatgcgatgggcacactggagaactttccgaatttcagctccagtataggcaacaaacaattcacagtgggccagatcgatcaggggattcgggtgaactatacgcttggtgatacatcacttggtattgatgcactgccgaagttgatcagcaaacagcgcctggaggagaaggttctttccaagctggatgctactgtcgcaagatacacatctgcccgatattatccaaccaagaacaatccggatattctggagcggctggatggacagatctcgaagcaacttgtgctgaataagatgctgggtgcctttgagacggcggggtatacggcggacgatctggcttttgacaatcaggagaatggagtcgaaggcggaggtgtatcggataagcccagctttgtcatttcagtggaataccgactggagcagggggcactcgttgtgactgtacctctgagccaaatagaagaaagtgggcaataccgcattcggaacattgatttgctcgcttattttggtgcagcggatacaaagggcgagggttacatgctcgtgcctgacggttccggcagtctgattcatctgaacaatggaaaaacccaagaagagaagtatgtacagcgtgtctatggcgcagacccaaatgataattcgctcagtcgttctcaggtgagtgaatccgcgtatatgcccgtgtttggtctgaagaacggggaaaatgcctggtttgcagtcattgaaaaaggggatggcattgccagtatctccgcggatattggaggcaggcagaatagttacaaccacgtgcatgcgaccttctccctacgcggggaggatgagctggagatgtacacctcgcagaaaatgcaagagatccagctgcttagcgaagagcctttccgtggagatattcaggtccgctatcatttccttcatggagaagatgccagttactcgggcatggcccgcctgtatcagaagcagttgatagagcaggatgtattgaagccgctcgcagaacagacggagttgccgttttatgtggatgtgcttggtgcagtggacaaaaaggcttcgttcttgagtgtgccctatcgaaccaccttagccatgacgacgtacgaacaggccaccgaaatggcggcgaagttacagcaggatggtgtgaaccgcgtacaaatgcggtatcagggatggttcggcggtggcatcagccatcatacgccaacccaggtgaagttggacagtgaagtgggcagtcgttccgaactgcaggcgttgtccaccaagctggagcagtcgggtggagctttgttcccggatgtggctttccagcacatttatcacgatgatatgcgctttgctccttcctcggatgcagcgcggtttgtaacgaaggagacagcagaactgtatccgtacaatcctgcacttaatcgcatggatcagagtagggacagttattatttgctctcagcggccaagcttccttatgtggtgagtgagtttgctgacaaattcaatcaactggaccttggtggactatcccttcgtgatcttgggcaggtcctgacttcagattatcgggatagtcgggtgattcatcgggagacggcgaagcacattgtgaaggaacagctgggacagctggaacagtcctatctgaacttgatgatatctgccgcaaatagctacgcttggggaagtgcacaacatgttgtgaatgtacccgcagggtcgagtcggttcaatattaccgatgaagaagttcctttttatgcgatggtcattcatgggtacatgaactacgcagcatctcccatgaacacgtcgggggatcaggatctccacaaacagttgctgcgcagtctggagcttggggcagctccgtattttcaatggacctatgaaccatcatccaggctaaagctgacgaattatgattcggcctacgcaacggagtatgcatattgggtggatgatgccgttgccttgtataagcaggccaatgaagtgctgggaaatctggcgaatgagcagattctcaagcatgaacgcattcaggatggtgttgtccggatcacctatactgggggtacatccatccttgtgaattacaatgcggatgcagtaaccgtggatggaacaacggttggcgggacggactatgtggtgggaggagtgaaccgatgagaaccattcgattatcgctgaagtcacggagagcgctgcttggacttgcatttatttccccttggctgctcggtttcatcttcctctttgccacgccgctcctgcaatcgattcgattcagtctgagtaatctgtccgttgctccgggcgggtacgttctggaatacgttggatttagaaatttcaaggatgcgcttctggttgacgctacgttcaaccggattctggtcgactctgttggagcgatgctactgaatgtgccgatgattttgttcttcagtctgtttacggccacactgcttaaccagaagttcagaggcagaacgatggcacgtgcaatctttttcctgccggttattctggcttcgagtgcagtcgcagcagctgagtctgcgggattaatcaatctgatgggggatgcgagtgcggtggatgcatcagccgatggcggtgcttcgttcaacgtggtatccattgtgcggatgctggcggatgtgggattaccgatggcctatgtggattacattgtagaagccatcatgcggatctatgagattattagtagctcaggtgttcagattctgatcttcctcgccgcgctgcaatcggtaccgggatcgatgtatgaggttgcgaagatcgaaggggcgacagcttatgaatcattctggaaaattacatttcccatggtcagtccgttgattctgacaaatgtcatctatacgatcattgattcatttgccgggagtccagtcacacaggccatctaccaaaccgcattcaaaacccagaactttggcttaagctcggcgatgtcctggctgtacacactggtgattggtcttgtattgatcgtagtgggaggggtcttgtcacggcgggttcactacaactgacggttaacattaagggaggcttcagattatggctgcatcagggacagatcgcatggtggtagttccgaagcagaattatcacatgcatcgggtgcgaaacaaaacatcggaccttctctattccatattcagatatgcactggtcatcggcatttcatttattattttgtacccgttatttctcaaagtgtcagttgcgtttaaggataaacaggatatctacaatccaacgatttatatgattccccagcactttacattggataatatccggctagcggcgcaagtgatggattacctgcctctgctggcgaacacgttattgtttgttaccatcacaacgcttctgacagcgatatcctgtgcacttgccggatatggcttcgcacggttttcgtttccgggtagtaatgtgctctttgtgctggtgattcttacgattctggtgccaacaagcacgctcatggtgccgatgtatctgcatttccgcagctttgactttctcggcattatccagttgttctcgggaaaaaatggcatcaatctgctgaatacgtattggccttccatgatcacggctgctacagcgggagggctgaaggcggggctgttcatctatattttccgtcagttcttcaagggcatgccaaaggaaatcgaggaggctgcattgattgacggcgcaggtggattcaaaacgtttgctcgaatcatgctgcccaatgcaatctcgccgctgattacggtcattttgttctcgtttgtatggcagtataacgataccttttattcggcattattcatgagtgaaagtccactgatctcgctgaaagtggcttccttacctgctcaggcgaaccagttgattccgcagctgatgggctttggctcgaactcgggcatcaaggccgatccaaactatgtggcgatgattgtggatacaggcattttgctggctattgcacccctgattattttgtatctgtttgtgcaacgttatttcgtggagagtattgaacgttctggtgtagtgggttaacatgttaaatccaattggaggtgtagagatgacagtgcgtgagatcagcagagttccggtgaatgaagcagcgactcccgaagcccgagagctgatggcgttcctcgtcgagcgttatcaaaaagggatgttgtcaggccagcaggattacagcaaccttaactggattaatgaaaatacaggtcgaaagccagctgtgattggctttgatctcatggaatattcgccatcaagaacagagcgcggtgcggtttcacaggagattcgggatgcgatagactggcacaaacaaggcgggatcgtgacgttatgctggcactggaacgcaccgacggatctgatcgatgaaccgggtaaagagtggtggcgggggttctatacggacgcgacaacctatgatcttgcctccgcgctagctgatactgaatcggaagcatatcagttattgatccgggatatcgatgcgattgcagttcacttgcaagagttgaaggatgctggtgtacctgttttattccgaccacttcatgaagcagaaggtgggtggttctggtggggagcgaaaggccccgaacctgccaaacagttatatcgtttgttgtatgatcgattggttcaagaacatcagctgcacaatctcatctgggtctggaactcggaaaaaccggaatggtatccgggtgatgatgtcgtggatattgtcagtgtggatgtataccctgaagcaggagatcacagcccgttggctgcacgttacaccaacctgcgagagctcgtacagaacggcaaaatcatcgcactggccgagaacggctccattccggacccaaagcagatgaaggaacaggatgtacattggagttggttctgtacctggacaggtgggttcctgagagacgggacgcataatgatgtggcgtttttgaaggaattgtaccatagcaaagaggtcattacgctcgatcagttacccaagtggagttggttataagaaacccatttccaacttgaattggaatcagagaagcgttagtattcgctgtaagaattcatgcgaatactaacgcttcatttgttggtagcgcacatttgttaatggaacccatcacccctgaaacattagaaggtgaacaaccatctagtttgacgggtgcaacatagcttggatattggtatgtaaagtcacgctggaagtgaataaaatgtacgattgattaaccgtgcggatcagaatcctttcgcttgtgccattaactggaccgatccgaatggcggatggttcgctgccaccgtacgtatcatccagggtgaccgatgtgatatgtgtgatgggaatttcaattttggaaaactgccaccggatgaccagttgatcttctacttttttcacgataacaccaaacataggatgacctcctgttgtgattcaaattattgaagtaatctcgtatgtccagtttatcatattttggataaaattaccttattaataataaagagtgacgatctctatcaactgatttcgaaagcccaaatctatcttgtgcaaaggaggagaatgtatgaacaactggaatgcctatcattattttgaacaaagtcttggtcctttcagaaatctctccagcctgtctgcggatgaagcagaaacagttacccagaagattcgtcttcagggacggaactttgcaagtcggcgacccgcagattacatgacaattcgcagaacacttgaacaaagggcttatgagcagtttgttgccaaaggtgggaagccggtacaatcatatccccattatctgacgctcggtgcatgcgagtggctgttgtcctggtattcagaacccgatcatgtaatcattccgtgggttgaccttccagttgaagttgtgagttttacctacggggacttgtttccaacaatgaggtttgacgatgctaaaccttatcgtaagcagatctataccaaggatgaaatcatggaagttattcagttctatggttggcctcaggaatggaaccgtaaaggtgataaggggccggaacgatatattgaggtacaggtctgggacgaacgtattatccaaccgtgcacacgtgactgagctcgttatgaagatttttgattttattatcgatcgcaagaagtgatcatgcggagatatcagtgtacgatatatcgagggtgggatatttgagtaaaacctacaggattaaccatgttacataccgaatacaaatagagaaattagaaaacttatactccaacacaaagggtgtgccacatgacgaatctattcgaacattgttcaggtcaaatattatctgccaacctgggatggctgaacgagccaacagattggtccattgaagacggcaaagtaacgataaccgtttcgccgatcagtgactttttcattgatccgggaggtgagccggtgaaagcttcagctccatttttacatacgatagtcaaaggggatttcagcatcgtcactcaagtacaggtggacatgaaagaacagtatgactccgggtgcctgatggtgagggtggacgatacgaattgggctaaagtttgctttgagtattttgaagaacagccgtctattcttagtgttgttactcgtggtaactccgatgattgtgtatcagcacccgtagacgttaataagccttatttacgtgtagcccgggcaggcaacagctttgctttccattattctcaggatggagagaagtggaagctagttcgttatttcggactcgactgcccggaagaaatcaaagttggcattgtggcccaatcccctattgggcaagggaccacggttacttttacagacgtacagcttcaacatggagtgaccggaagtgttcgccgggtaatataacagcgatcagaaggttgttctgtcatttatttcacccgaattaacattccaaacagaccgagtatagcaaaggccagaaatgccgttgtattggaaaacacttcgatcgtataccctgccatagaggagccaaggaattgcccaacacccagcgcgagaaaggcaaggctaattccgatggacacatttggactgaatagtctcgtcgcccaaacgataaatacactggtcaggaaaatatacgtgctgccaaatatgatcgcagagatgagactggcagtcattgaaggcagaaggataaccccgagcgaaatagccaataaaagtatgcctattcggtaggaccacccaatctcgaaccgttcaataatgcgaccagcgcatccaccgagtatccccataacccccatcacaatccagaacaacacggcttccgaatcggaggcccctttctcgtctgtgaggaagttccgggcaaaggtccagtagattgcagaactgaaacctgtcaacagacaagccatgagcagagcagaccctggtctggtaggtttcatacatgtccagagagacttggtacaaggcagtgtcttggttgccggaataacacgtctgttccacaaaagaaccacaacaccgattacagcaaacaggatgtaggttagacgccagtaatccgtgaacagccagtagagtgggcccgatattacaatcccgaagctggttccggtgttaatccagctgttgcctcttgcttgtagctcgggagcaagctcggcattaaccgtgttaccgagggctggagaggcccagcctgtactcaaacctgctagaaatatactaaatgtaagaacccatgcattctgagccagggcaatgccggttaatccgagcactgcgctgatccctgccaattgaatgacataatgatgtcccttgcgattaatcaacagtggtgcagttagaagggacagacagtaggcaatatacgttcctgagttaatcgcgccagaggctgcatcatttaattgtaaggcttccgaaatttccggcataaacaatccataactgaatcgcccgaatgcataacatacagcgataagtgcaatgcctggaaagataatttttttcattaaatccaccgccttttagatagaacgatcattatatttctcattaaataaaaaagtgagttgaaatattaactcacccggaatagctttatttgaaactggtctgcgtcatatggatcagttcaaggcagacgtcatttacattttctgtctcagcaagtgccgtggaaccctccagcagcagggagaatcgtaatagatctcgatcacttgcagcaggcgccaatgtttggattaaagttcgcatatgtcttttgtgcgcatttactgtctggacgatgatatggtctgtatgacctccgaattcttctttggcgcgtaaaaataagcaacctcttgattcgtgttccttcaaccaggttgcatgtccttcagcgagattgaggaacatgggttgtgctttattgtctgcatattgcctgagctgttctaaataacgctgttcgcgtcgcaagagtacctggacaatgagatcatccttggactcaaaatgattatataacgtcatgatggcaatcccggcatccgtgataatccgcttcaagccgatagaatggaagccgtggaggtagaataattcttcagccacgttcaaaagcatttcctttttgctgctcatgatcagtaatactctcccttcaaaataagatagaacgatcattatacttgtaggctataatatatcttttacattgtcaaatgttgtgactcctcttgtctttggttagttcaaagcctgggcagggcgttatatgaacaacgtcgttgcacattaaccggacatatgagagcacaacatgacaggtttttgggtggtttatccgttatattagacatcaaggagtgattattacatgaactggatcaacgcattacaggtcgctattcaatatatggaagaccacttactcgaaaatatgacgatggagcagattgcagcgcaggcccatatctctccttttcattttcagcgtacctttgccttattaactgatgttactgtagccgagtacataaaacgcagacgattgacactggcggcacatgagctgcttcaaagtgatcacaaaatcattgatctggcatttaaatacggttacgacacaccggaatctttctccaaagcatttcgtagacaacatgggatcgcacccagtgaggctcgaaagaatagtaacgctgtccaatcgtataatcgtctggtgattcatgtgagtctaaaaggagcagaaccgatgaaatataaaatcgttgaacatcccgaatttacgttggtcggagtagagcaaactttctcatatgcagatggagaacatctgcaaggcatcgggaagatgtggcaggaagcgtggacgagcggtacagaggagcgtttatttgaactgaacaatggggatattccaggtttactcggtgtcgttgtggatcagagcgaaatccaggagaaacagatgcaatattggattgctacgacttacgatggtgaagtaccggaaggattatcaagcttcaccatgcctgcttccaaatggagtgtatttgaagtagaaggcccgatgccggagagtatgcagcttctgtggaaacggattatttcggaatggtttccatccaacccgtatgagcacgcatatatgccggagctggaagtatacccggggcccaatcaaccgccacaaatctggataccgattaaataaattttaaccgtttcaaactcgatcattgtagcccataaacattcggataaccgaagctgtttatgggttatttggttgtgattaatcagagattcgaagttgtacagaggatgttcaagcgttgttcattttattgcagccaggtaaacatgatatattggaatgaaggttaacatctataagaggacaacgaggtaaaccgcaggaggcagatatgttatatgaggccccattcattcagacgatcatccaacacgagcaattaatgcatgacctgcggagagttcgtagtctccatttgcctcaaagttacatagctgcaggatatattcgtaattattgaataataagtgatttgcggaataatgggtacaagaaggagtgtctacggatttgataaaaaagttcttacaaaaaaatggactgatcattgatcttgtcctgttggcatgttttgtggcgttcctggccttctggggccaaagattcccagtcatgttttttggaatgatcacggtggcttttatcgttctaagacggattgactatcagaagcatgttattctgaaacggattatccttaccggaattagcgtggctgtcgtctcttttgtcattatcgaagcccttgtattcacacagcttggttcgaatgatccggatgaggcagactatgtcattattctgggttccggcatccgtggaacggaattgtcattgaccctaaaacaaaggttagatgccagtctggactatattcgcagccaccctcagacaccggtcattgtatcgggtgggcagggacctggagaatccattcctgaagcgctcgccatgaaaaactatctgattgaacaggggattaaccccgcccaagtcattatggaagatcgctccacaagtacacaggagaatttggccttttccaaaagaatcattcttgaatccgggttagagcaccctgagatcatgattgtcaccagtgactatcatatgttccgttccaagtatatcgctgccaagaacggttatgcggcagaatacggcatatctgccccgtcaccgggttatctgaaacccgtcaacatgatccgtgaatattttgctacgatcaaaacatttatctaatgcacatgacagaaaaccggaaacaggacgaagcggagatctatgatctatgcttcgtcctgtttgcatataaggatggctattgctccttaacgataggttatttttctgaaggagcaggcacagttactgaaaccttatccccagggagagctaccatttcaggagattcaccggtaaaaggaacagtggctgattctacaactttagcctcagaaggttcagtagtagatggaacagtagtagaaggtacagtagcagacggaactggcacagcttcggaaacttcatcctcagggagagccacgatctcaggagtttcggaagtagaaggagcagttacaacttcggaaattccaaccttgttgggagaagctacgatttcagaagatccacccgtagaaggaacaggcacagcttcagtggcatgggcctccactttaactgtgtggtttgatgcccatacggcggtggacgtacttacacctgtaataagcaggagggctcccatacttaacatccaatgtttctttttcagtttctttacattaaacataatcatcaatctcctttttaattgtttgccttcacccgatagggacgaacaaaattgagcaggcattttcttggttcccgccatcacatttaaaattgtctcaccatatcgtcttcgttcttcgtgggacatctctttcaccacatcttcatcacaggccaactcgctccaggtatgaatgtcccggcgaatcatatgaatcaggggattgaaccagtgcagggcactaacccccaaggtcaaagctttgacccacagatctttatgttttagatgtaccaactcatgatgaattaccatactgatgtccattttcaccgtattttcgggtggcagatatatcgttggtttaaacaagccaaccagtatagggcttcgtactagcgtgctgtgagcaagcgtgatattacgtttgagacccaaagcctctttgattattggtagctgtatagctgcttcactatgacagaggactggggtacgtgtacgagataattcattcagaaatctccgataacagtacacctgccatgcagaaaaaccaatgactccaatgccccagacgcataacaagaaccaggctgtggttaccgaaatggtttgttccgggataaacgttcctgcaagtacacccgaagctgctgcattctccgtacccggtatagttgatgtcgtttggaatgcaatatccaaaagccatgaaattccaagagataccgggaacagataaaacaagatagccagtttaccgagtctgtagagccacttggtcggaaaaacagatacgggtataagtcgtagtgccaaaatacaaacagaaacgatacttcccgccacggtcaggctgcacagaatctcaaaaaagatattcatcatctgcacctacttttccgaaagccattttttcagttctgaaatgtcattgtctgaaagcttgtcaccgtcatacatggccgaaaccaaatttttgactgaaccttgatacagtccatcaagaacgtgctgcgtttcctgtagtttgtaatcttcgggctttagaagaggctcataatcattggtccgtccacgtctcgtaacggtaagagcgcctttatccaccaaccgtgacagaaaggtagacatggtctgcgctttccacgctttccccttctcagcaaatatgtctaatagttctgtggaggtgaccggtggggcgcatgaccatataacaaccattaactccatttctgtttcggataatttttgaatctggttcacagtgaacactccttaacatcgttatgcgtccataacgatcatattactacactacgtagtacgtataaactactacaacttgtagtggatagtcaagttatcctgatagatgattgccaaaccatgttataatataggtcattaatagaagaacgatgtaggagtgaatgatcattacagcatatcaattacctgctctctatgagcagaagcgagtttcaatgcaagcgatggaagagattgtacgcctgttggcgcaggcaccactattatatgatgatggacagggcatcaaggttcaggattacatgggaggcttggaggtcgaacttgagcatgaggtacgccgtgcagtgaccgagttgtacgaactggctgttcaggcctgccgcgtcttcgccgatccattggcgtacgagcaacttcaggatgcacttgggttacaggctgagttatggcaggaggaagtgcttactcttgcaaaatggatggactggctgaagcagatcagtgaaggaaagagaacactgcccgagtacaactttacagccatgcttggcaatctgccagatggattcatgatccatgatttttatgatgaactccgatatcagctggaacaaaaccctgcaaacgcatgggctatcgaagagcgggatcgcttgtacgcagctctgggtgcgaaataaatcaaaccaacgggtcaccggcggtgttaatctaatatctgcattttgcatgtatataagcattccaatctataccttgcgaattctttacccagtatgggaaatgaggggataccgtgaagaaggttgtattagctggtggaacgggatttgttggacaggattttgcccaaaggttcagaaagctggggtatgaggtgttaattatctcgcgtcagcccggtcatattgcctgggaggatcgtgcaggaattataggggcactggaagaagcagaaatgttgattaacctggcaggtaaatcggtgaactgccgttatacggatgagaatcgcaaagtcattctggaatccagaacccgtacaacgcgcattctcggggaagccgtcctagcttgtaatcaacctcccgaactatggattaattcgagtacagcgaccatatacagacatgctgaagatcgtcccatgacggaaaaagagggcgagatcggctccggattctctgtcgaagttgccaaggcatgggaacaggctttctttgaattcagtctgccgtctacccgtcagattgcactgcggattgcgattgtgctgggtgagggtggcgtgatggtgcccatgacgaacctcgtccgttttggactgggaggatctcaaggcgcaggaacacagcagttcagctggattcatatcgaggatctcttccgcatggtgatctatctgcaagagcatccacacttgaatggtgtgtttaatgcgtcctctccgcatcccgtgacgaatcgggagctaatggcgcgtctgagagaacagatgggtgttcggatcggactaccttctcctcgctggatgcttgaactgggcgcacgttttattcagaccgagacggaattggttctcaaaagtcgttgggtaattcccgagcgaatggagagggaaggattcacgttcacatacggtacgctagatgcagctcttgccgagatcttgaataagaagaaatgacactttatacaaaagaaaacacaacaggaagggcagaggcatctgcccttttgttatatatgttcaactaaacatttacacgataacagcgaggacagaaataacttgaagaagcgaagcgttcgcctaaaagctttctgaaagaaagctgcatcggaagcatatgcttatccccggattttccctttttaagaagggaatcaaaaaaatctggggataacagcgatcggaaagttgttctgtcatcgcagtgtctgtgtaaatactaattagctgaacttatagaggtttttcaaaaagtccgcttttgattacgaaggatgcctatcggcatcatcagcatcgaatatggaattcagccgaaataagctggaggcttacgaagtatgtttcctttggaaacattatggttgctcacgtagttttcctacgctccgctactccatttctagcttcatcccatcttctcggtactgaaaaccggtctttttgaatacgaacttatatatcagtcagatgaacagaaagaggttggggaaatgcaacttagaagagtaaggatcgcagggacagggaagtacctgcctgaacaggaagtcaccgatgaggaactggatcgccgcttggacgtgcctgcgggctgggttagcaaagctacaggcgtaggtgtacgtcattatgcttcgggtgaagaaacctcctctttcatgggcgcacgggctgcggaagctgcactggcggatgcaggattacaatttagtgatatcgactgtctggtgtgtaccagtggcacgaaggaacaaccgttgccaagtacggcggtatttatccagcaggccatggggcagcaagattcgggcgtacctgcctttgatatggatgcaacctgcctaagtttcctgaacggactggatgtgatttcctatatggtagatgctggacgttaccagcgagtactgctcgtagccactgagattgcctcagccggactgaattggtcggataaagaaagtgcggccctgttcggagatggagcggccgctgttattattgagcgttcgcctggagggtcatcctctcagattgtacatgcttcccttcaaacctacagccgaggtgctcgcttctcggagattgcaggtggaggtacacggctgcatgcttcgaattataaggcggatcagcctgaaccctacctttttcatatggatggacaggcgatcttccgcatggcttccagacttttgcctggcttcattggtgatatgctgcaggcgaccgggaatcgaatggaggatttccaattggtcattccccatcagggaagtgccatggcgatgagactgattcgcaagaagcttggcattgctgaagatcggtttatggacatcacacgaaatcacggcaatacgattgcggcatcgatcccgatgggtctgcatgaagcgattagacaacagcgtattcagcgtggtgatcgggtgttgatgattggcacggctgccggattatcattgggaggactcatttttgactactagatctggggaaaccagacatcgtacagctgcttctctccgtgtgttgcttacaggaggaagggctcccgtaacgctcgatctggcacgcatgcttcatcgggcaggccatcgggtctatgttgcggagagtgccttacggcatctgaccagatcatccagtgcagtggaacagtgcgctgtggtcccatcgccgcgtcataacacacgtgcttatctggcagagctggaacggttggttcaggcttggaagattgacctgttgattccgatgtgtgaagaagtcttctatgttgctcaaggggcagacagactgcgtgcatattgtcgtgtcctggttacaactctgaagcagctgcatgagatgcaccacaaatatgattttatccagcttgcaaggtcactcggtctttcggttccggatacacgtctgatccacagtcggcaggaatggatggaagcccagtctgttatagaaaaagtaggagattgggtgtggaaaccggtgtattcccgctttgcagccaaagttcgcatgccaacactcatgaccgatgacgctggggcagggacgaatcaggaaggaaacgtaagcgaaaagaaacgtcgacatatccgtaacgaccctccggacgacgcggaattatcctctatttcaccttgggttgcacaggcctacattcctggtcagatgttatgtacatacagcatagcgcatgaagggcaactggttgcacatgccacttacgacagtcgctatcgtacaggaagcgtgggagccagtgttttttttgaacaggtggaacatgaaggtgcccttgcgtgggttagacaatttcttgaggcaacgggttttagtggacagattgggtttgattttatagaaggtcaggacaggcgagtgtacgcgattgagtgtaatccgagggcaacgagtgggattcatctgtttcaccccggagatgacttggtgcgtgcactgactgaaccggagacgttggtaaaagaaagaaaaatgatcacgccctcacggggcagcaaagccatgctcatgctccccatgctgggaagcggagtacagcagatctttggcaaagggaaactccgtgcatggatatctgcgtggcgtggaaccagggatgtggtctatgtagggcaggatatccagcctgtatttgaacaattcggagtggtgctagccgcatggcgtctggcaagatcgcagaagtgctcgctgactgaagctttgactcatgacatagaatggaacggtgaacaacaatgaatagagcattggttacaggagctacgggatgtctgggcaggcatctcgcgatacgacttgctaaagagggatgggaagtcactggcatgggccgacagccaaaggttggtgcagaacttgagttggcaggaatccgattcctgaatggagatatacgggatgaggctgcagtgaacgaagcgtgtacgggacaggatgtggtgtttcactgtgcagctctatcctcgccatggggccgatatcgtgacttttatagcagcaatgtggaagggacgcagaatcttgtagatgtatgcctgcataatgaagtacagcgattcatacatgtctcaactccgagtatatattttaactacaacccgcggtataacgtacttgagaatgatccgttgccatccaaaccagccaatcattatgcaaccacgaagcttctcgctgagcaagttgtgataaaggggcatgcgaagggacttccgtcgatcatgattcgaccgcgagcgatctttggtccgtatgatcagacgttatttcccagaattgtcgcagcaaacgcaaaatcgggcgtgcccatgatcggtggtggacaggcgttaatcgatctgacctgtgtggataatgtggtggacgccttgttgttatgccgtgatgttgatgccgcagcactcggcagagcctacaatatttccaatggcgatccgagagcgttcagtgagttggtgagcagcctgttttgcatgcttgatatgcccttgcgtcgtcgaaacattccttatcggatggcatatggtgtggcagcgttgctggagcgagttcatggctatattcctgcgttgggtgaacctgcgttaacaaggtatacagtcggctccttatccatcccacagacgttggatattacggatgcacgggagcaattgggatacattcctcgggtgtccattgaagagggattacaacaatttgcagactggtggagggctgaatcatgctgacaacaactccggttgaactatatttgggtgcggcgggttactgtacacatccagagtttctgacgctgcgtggtggtcggttgagcccggtgcctttcccggcagggtttgcctgcatcattcatcccgcacatggaccgatcctgctggatacgggatatagctcccgcttctttgaggaaacggctcatctgcctaacgcactgtatcgccatattacacctgtggtctatcgtgaagaggatagtgccgttcattttttggctcgaattggactgaaagcttccgatattcggtatatcatcctctcgcattttcacggcgatcatatcgcgggtgtacgagatttcccggaggcacaattcatctatatgccaagggcctatgatgctgtgcgctcactcggtccgattgcggctgtaaaggcaggttttcttgccgggttgttgcccgaggattttatggccagatcattgcctgttacgtgtcagcctgagcgatggacgagagcgggggaagctttcccttttgaagaggtctacgatatcttcggtgatggcagtctgctaggggtggatgtatccggtcatgcggaaggcatgatgggactactgttgcgtacagaagaacatgactattttctctgcgcggacgcggtgtggtcaagtcgggcttttcgtgaacagcgcagaccgaatattcttgctggaatcattatgtcgaatcgacaggaataccatcgtaactttgacaagctggttcagctgcatcagcaatttccccacattcggattgtgccgagtcattgtcgagatgtactggacgcttggggtgcaggagggctgaaacgatgagtaatacccttcgtattgtggttcattatgcactcgcacgtgggctgcgaacatggaaaacacgagaacaatttgagcgctggcaagagcgccggattattcggcatgttcatcagatccgtgcccgatctccgttttaccggaagtggtggggtggcgtggacgcaaccgactggagaagctttccgttgattgacaaatcaaccatgatggaacattttgatacactgaacacggtgggtattaccaaggacaaagctctggctcttgcaggtgaaagtgaagaaacacgtgatttcaaaccttccattcaaggcgtgacggttggactgtcttcgggcacgtcagggaaccgggggatatttctggtgagtgatcgggagcaggatgcgtggacgggtacggtgctggccaagttgctgcctggtggactgtggaaacctgcgaagattgcgtttttcctgcgggccaacagtaatctgtatgaatcggtgcaacgtggcaaattgcagtttcagtactttgatctgctggaacgtgtggagaccttggttaagcggctggaaacctaccaacctaccgtgtgggtggctcctccatccatgctgcgtctgttggcggatgcctatgtggcaggctatctgactgctgtaccggataaaatcatctctgttgccgaggtgctggaccccctggatcgcaaggtgttggagaagatcttcggacagaccgttcatcaagtctatcagtgtacagaagggttcctgggtgcaacctgtcgttatggcacactgcatttgaatgaagatatcgtgcatattgaaaaagagttcattgatcccgccacccgacggttcgtgcccattattacggacttctccagaacatcacagccgatcatccgatatcggctgaatgatattctgaccgaggcggcgctgccatgtgcctgtggttccccgtttactgccattgagcggattgaaggccgctgtgatgacacgctttattttacacaactacttacgggcgaggcggtaccggtctttccggatttcgttacccgttcggtcattgcggcttcgccggatattgaacattatcgtgtggtgcagcaaggggacggaacaatggaggtatcccttcgacttggcgggaacgcagtgatggctcaggttgagaccaatgtactgctggaacttttgaagctgggagagcggcttgaatgcaccttacctgagatcagatttgtaccgtatacgtttgaaccgggacttacgaagctgcgcagggtggagagacggcataatggagtggcggattaagcagcaggggccgtgcggtataggtaggaacgggaagtaagtaatttaccgaggaaagaaggacacaccgtgacagtagaggaaaacttaacagaagccggacagggacggattaatgcaggttctgatgtagtgaaaaagacgaaggaaggaactaacgctccggtggccttaattacgggtacctccagtggttttggtatgcttaccgcaatcacccttgccaagcaggggtatcatgttgttgctacaatgcgtgatctgagtcgaagagaagaattggtgaaactggctgaacaggcggggttagctgaacgtttgcaatatgtgcaactggacgtgaccgatgctgaatccgtgcagaaagctgtgcggtccgtacttcataataatggccgaatcgacatgctggtgaacaatgcaggatttgcggtgggcgggttcattgaggaagtgtcaatggaggattggcggcgccagatggaaacgaatctatttggattaatcgctgtgacacgtgcggtcctgcctgtgatgcgtgaacagaagcaggggttaattataaatttgtccagcgtcagtgggttgtccggttttccagggtatgcgccatatgctgcctccaaattcgctgtggaaggattcacggaaagtttgcggcatgagatgtcttcgttcggtgttcgggtggtattagttgagcctggctcttatcgcacaccgatctggaataaaggtttgggtgagattcaccggagcgaggactctccgtataagcataagctggacgcggttcttcgttattccaaacatgcgagcgagacggcacctgatccacaggaggtagccgatctgattggccgaattgcacggatgcgtgcaccaagacttcgatatgcgctcggaaaaggttcgcgtgtgctcatcataggtaaagcactgctaccgtggaagtggctggagcggatcatcgcccgtggattaaaatagagataaggtacgagtcacgattgcgtaatttccgaaaaggagagattagccatattcgaatttatcgtcattattttacttcttgcgattgtgggtctgctctttcatatcaatagcaagctgccagcgcgtgaccgggtgaaggaagcaatggaacgggatcggaatcagaaacataatcaggatgctccaaattaaaacgcggaggttaccaatgaaaatggcattcgttttgtttgatggactgactttccttgattttgcagggttttatgatgtgatcaatcggttgaatttctttgaacctaccaaaggaacgacgtgggaaacctgtgcgatgacagaacaggtcacggatgagtctggtctaacgttgaaggtggatcgggtgaaggctgacctatcggaatatgatctcgtgtttatccccggaggcatgggaacgcgcaagcttcgatatgacgaggcctttgtaggttggctgaaacaggctgagtctgtgcctttgaaggtttcggtgtgcacaggctctctgctgctgggtgcggctggttttttatccggcaaaaaagcaacaacacatccccgtgcatataatttgcttgagccgtatgtcaccgaggtgattcagaagcggattgtaaaagatggaaatgtaattactgccggtggagtagccacgtccattgatctggggatttatgttgttgggttgcttgcaggacaggaagcggcagcgaatgtaaaacttcagatcgattatccttatgagatgcagggagtggtcgaagaatgaaagaaggccgaaagcaagagacctatatcattcgtaatattcagcgggatgaagcagacatctactggcatttgcgactggaagcactgaaaacacatcctgaagccttcggggcttcgttcgagttgtccattcaactccccatgagtgaagtgcaggagcgcatacataatgaaccggatgattatattctgggagcatacacagaagaaggaaccttggcgggaatgatgggtttcaaaagggaacacggcctaaagctcaggcacaaaggtatgatctggggcgtctatgtagctccgccatatcgggggagtgggctggcttcgcgtttgctccgcgaggtgctggatcggggaagacatctggaaggcatcaagcagattaatctgagtgtagtgacaacaaataaatcagcccgacgtttatacgagcgatatggatttgaagttttcggcatcgagcgtaacgcattggaagtcaacggtcagggatatgatgaggcgcatatgaattacttttatgctgagcactcaacattggatgaaaatatcaccacaggaggagtccgatgacagatcatgttgaacttggtatcgacggtgtttcctttgttttaaaagagtctcattctttcgattggttacagccattgggtacggtctttcgcgtattcgatcagcaggattcagggaatatctccttcggtattgtgcaaaaggatggaaagcgattgttcgttaaatatgcgggagcacatacaattcatgcgaatcatgcgggaagtcccccggaagccattcttaatctgaaatcatctgtttccgtttacgaagatttggcgcatgacacgttgattcgactaacggatcattttgcaacggatgaggggtatgcctgtgtattcgactgggtggatggggagtgtctgcattcccattggtattttccgcctccggccaaatatgaagatccgcgttcgccctattatcggttcagacagctttcggtgaagacacgtattcaggcgatggagcagattctgaattttcatatcgaggtggaacgaagaggttatgtggctgttgatttgtacgatggcagtctgatctatgattttgacagaaactttatgaaaatttgtgatatcgacttgtatcggaagggctcttttaccaatactatggggcgcatgtggggatcttcccgctttatgtcccctgaggaatttgagttgggtgcacccatagatgcggttaccaatgtattcaacatgggggcaatggcgtttgggttgcttggtggggagaaagatcgttcctatgacagatgggatgccggagaagcattgtatcaggttgtgatacgtgcagtgagcgatgatcggtccgagcggtacgcatcgattgcggaacttggtgaggcctggaaacaagctgcgatttaaggtcaatgagtgagtggtggaattttcgcaaatgtgcaaaatccattcgtatatgtgtgtgaaatcccgtataatggaaattattaagggggtgcagatgatgtgcagatatgccttgtcaggaccatataaagacatctatgcatgtttcatttgtttggagcagcaggaagctggtaaaggcagtgtaggcgaacgattattgcaaaggttaacttcatagttatggttccaaaatccaacctgtcgtctatgggaatgttgaaaatacaggtgagtactttatatacgatcaacgagcagcagcgtctattaagcatcaacgagccgggtggtgggcaggctccagccatttttatcggcatgacttctgctggttcactgatctattatcatgagcagttaccgccggatctaatggatgagttggggaaggattgcgagcttccgttggatattccgaaactgattcgaaaggtggaaacctttgagccagttaaccgtgtgtggatgggacccgcctatgtttttcctgagtcatctcacgagtggaatcagaaggttcagttgattggtcaggagcagcgttatttgctggcagagcatttccctgaattaacagactacttgtatgaaaaaagccctgttgccgcttatgttattggggattctgctgtagcagtgtgttgctccgcgaggctctccaatcatggggcggaagctagtttgtatacggcacccggttatagaggacatggatatgcagcggagacagtaaagtgctggcagtattatgtcaaggagcgtggacgcatgccaatctacagtacatcttgggataatcttgcttcacagcaagttgcccgtaaactcggattaattcagtttggtgtggatttcagtatcacaactgtggatttgaggaaggactgtgatgtctgatgattcgcactttcgtacaaaaggatctgaagtatgtcattgaagcgcatatccgaatttatcgaaacgagtataattatgatcatagctttgctgaatttatcaccaacgcggtgaattcgtttggacttaaaggcaatcattcgagggagatgttatggattgttgagttagatcagacagcttccggctccataggacttactcaggtgaatgaaaatacggctcaacttcgctggtttttgatcgaaccggaagcacgtggtgcaggatggggcggggagcttatcaaacaggcaattctttttgcaaaagaaaagaactacacatctgtgatcctgtggaccaatgagtctttgatcagcgcgcgtagattatatcaatctgtgggctttgaagtgaaggaagtccgcaagcagatgttgtcaggtcaggagcttaccgaagaacaatgggaacttgttctgtagttggccgagggcttgagcatgaaagtcgaatctgttgcgttaactcgttgttgaaaggagtggtacagtgaatcggagaagactgattctgggtttgttatccgtatgcacagcattgacggtagcagcatgttcgattcggacagaagaccaagcattatcagcatcgattgaaagcaacctgcagcagatggttagcgaccctgtcctcctgaccagtagcaatccgaatgattatattgctggtaaccgggaggcatacgacgacatcttgaatacgggtgaggaaggattgcatctgctactacagcagctcgaatccagtccggataatggtcttaaggaatggatcatggctcaggcaagtactgaactgcttggagagcttaaccctgtagaggcgtggcatagtggcaaggactggctcagacagtataaaatgagcgtagaataatggcttattttctctatagtacctgacttagcggaagtaatggagggggcggaatcgattctgaagaagcgatagcgttcgcctttgtctccgaatttatacatctataaggttattcaagaaaatttggagacaacagcgatcagaagaacgatccgtaaccggaatggttcccgcaagccgtcaagcactgtagtgtgtgatgagccggaagtacaaacctcacctccagtcagcatgagcagcattgagaggttcttggaacccgaaagaatacattatagaggtgaaatccttgaataaaaaaattgctttttttgattcaggcatcggtggtttaaccgttttgcataaggcattacaacagtttccggaagaaaaatttctgtattacgcagatactttgcatgtcccgtatggaaccaaatctgcggatgaggttagaggacatatttttgattgtgtggaagccatcgttcaggaggatgttcaagccatcgtgattgcttgtaatacagcaacaagtctggctgtgaaggatctgcgcgccaagtatgatatcccgatcattggcatggagcctgcagtgaaaccagccgtggagatgaatcgcaacagtgggaagagggtgcttgtatttgctacggccctcaccttgagccaaaccaagtataacgaactggtatcacgtgttgatgatcaccacagtgtggattccattgcgttgccggaacttgtggagtggtgtgaacagctggattttgatccgggcaaaatcgctgattatttccggttcaaactggcagatgttgatcttcaagggtatggcacagtggtgcttggctgcacgcattatccattctatacgtccattctgcgcacggttctgcccgatcatatacagatcattgatggcagtacaggcacagtgaaccatctgaagcagcggcttggactggtggctcaacatggagacaggacaggggaacaggtcactttcctcagttcatcaggccgaccggaagagcaggagaagatgtacagtgcacttcaatatcttgagatgaactccaagtaagttacaccataggaggtgatagctatgcagtccatttatcttatccgtcacgccaaggccacagggcaggaaccccatgcagagcttacagatgaagggatcaggcaggctgaaaaacttgcagatatcttggctcatcattccataacgtatattgtctccagtccatggaaaagggccgttcagacggctatgccactgggcatagcaacgctgcaacatatacatacggatgaacgtctccaggagagggtacttagctctcttgatctgcctaactggatggatgcactgaaacgtacatacgatgatgtggattggatggaagaaggcggggaatcttcgagaaacgcggctacaagggggctggcactactggaagagttgtggagcagaccggaacagcacgcggccgtggttacacatggaaacttgttatcactgcttattcgtgagtatgaaccatcctttggttatgaagagtggagcaaactgtctaacccggatgtgtatgtgctggagagacaacgaccggatgcagggctgtccaccattcgaagaatgtggacagattaaacagcaaaagagtgctccagcgatattatatcagccagaacactcttttcgtttatccacggggcaagtttacaatgcggcaatcatgatcataacccatccagccaaaaatgcgactccgccaagtggggtaatggctcccaatttgcgaacacccgtaacacttaaaacgtacaggctgccagagaacaggatgattccggcgaacatcagccacccggcaagcatgacgagcgaagaggattcaaggcggtctgccagcagtccgatcagaatgatcccaagtccatggatgaggtgatattgaacaccggtttcatagattttgatcatgtcagcggatagtttgcgcttgagcgcgtgtgcgccaaaagcgcccaatgcaacagccaggaacatcataatactgccgagtataatcagggtttgcaatgtgtttttctctccttttaagggtaattagatataacatcaaagtgtactgcacgagtgttgtctacagtttgcgcaattgaatctgcccaatggagtgatcggcttcctttttcagaatcagtctggcacgtcctttggttggcaaaatgttttcatgcaggtttttggcattgatatcttgccagatctggttggccgtacgtacggtttcttcttcatcgatattggcgaatcgttgatggaaaaaggaatctgtgttctggaacgctgtattgcggagtagcttgaaacgctcaacgtaccagtgtcgtatatgctcttcttccgcatcaatgtagatggaaaaatcgaagaaatcactaaccagcaaaggcgtttcctttttgatctgaagtacattgataccttcaataatgagaatatccggttgacagatctgcttctcttctccttgaatgacatcgtaggcgaggtgagagtagacgggtgctttcacttcgggtttgccagatttcacatcacccatgaactgaatcagggatttgatatcataactttccgggaatcccttgcggttcatgatgcccttctcttgtagcaccgcattgggatataagaaaccgtcggttgtgacaaggtcaaccttcgggctattcttacctctggcgagcagtgcctgtagcaagcgggccgctgtacttttgcccacggcaacactacccccgattccaatgatgtagggggtggggagggcttcttttttcataaaggaggccgtcagttgattcagctctcgtgaaactcttgcatataggtcaataaagtgggtaagaggcaaatatatatcttcgacttcttgaatcgatacctcttcattcaatccctttaactgttctaattcggcttccgtcagtggaagagtggtctgatgttctttaagttcagcccattccttgcggttaaactcgatgtaaggagagtataaattcatgagatcccgctttctgtatgtaatataattgtggacacaacctttagtgtatcaaatttcaggaaactgacaacacctttacattgtgcctttcataatgcctttcgtcaaaatggagcgaaaaacaacttactaggaaagtttaacccaatttatgttaaagtcaacgtataccatgcggaagggtgacagcacatgatcgtatatgagagagagcatgattttgttttgaccgcacagcatgagcatggattagtagccggagagatggcttcccactggaaaaatgaattattagccgatgctgcgcatcgggatgaattgattctagcggccaaggaacatgaccgtggctggattgaactggattcgtctccgttctggaatgattacagtcaatcgccgtattcgtttcgtgactttccattgcgtccgcgttttgtattctaccataaagggattgaagaagttcgtaagaaaaacctctacgccggattattgtgtagcttgatgtacacggaactgtttcagaaaaatctgggggccaatgctcaggatgatgatgacatccgagattatctgcaacaagaacacgaacgtcagctggattgggagaaacagcttggtggtgatgctgaagccctgaaacagaggctgcaaagtgatgtggagattatgcttttctgtgatcagctcagtctgtttctctgcatggaggaacctggaacacctgctgcgcgttatgatttttttgcagaagggctcagttgtacgtttgatgcctgttccagacaaccgattcaaacagagtggttatccaatgaaaaagtaggcctgtcttttttcccgtttgatgaggactttacgatcgttttgccttataaatcagtgccgaaggcaagtatccgcaaatttggtatgcaacaggcttatcgccgggctgaatggaaggaacgccgggtgttgattacggaattgaactgaggactggaaactccagacttgaggaaagagcagcatagaatatcacaaaacaggcgggcttctgatgtacaggtgtacagggcgtccgcctttcgtatgcatatatatcatcatagactatactgtgagaccggtgaaaatacgaatgaatcagagtgggaataaagaaggaaaacacaggttattcccagaaatgttagtgtacagcagagaagcgcacgttagcaggaggacgaatatggatactagaatagaaatattaacgatgtgtatggtatgggacaaaatgaatgatcaggtgttgttaatgaatcggccggaccgcaaaggatttccgggatacatcgctcctggggggaaggtagattttccggagagtatcgtggatggtgccgtgcgggaggtcctggaggagacagggctagtagttaatgagattacgtataaagggcttgatgagttctgtgatcccgaacaaggattgcggtacatggtatttaactatttggcgacttcattcgagggtcagttattgcaagatccgcccgaaggcgaactgttatgggtgccgatgaagcgggtttttgagctgcctatgcaggattggttcgctgaacgtttcccacgttttttccaaaaaggcacttttgagcggagtgtgatctgggagaagtcatccggacgtacgttgcaagaaacatttatgttgtatagcgattccgtacttgaacagagtgggacccgataagttaaaccgtcagaaggaggaaaaatcatgggataccagcatgccctgcaaggatacagtgcggcgacgcttgatggggaatggaaattaatccatgagcatttaagcttgggttaggataaaaaataatgcctcataatgtatcatccatatctatatatttatatccaaatattatgatataatgaagtttactatctttataggagatgactagtctgtgggtaatagtgtgtgattaatagattgagtaaactagtttgttgaaatgaagaatgatatatttgtagatttgccatacataggcttctgcaaacagaacgtaaatgaatattgtacgatgaaaaggtggagattggcatgaaattgtcgttccggattttggactgggaagaagagagaccctacgaacttttgttgatggctgatccttcaaaagcaattgtggatgaatacctgagtcggggtgtttgttttattgccgagtatgaaggagagatggttggggagttcgtattgttgaagactcgtccagagactgcggagattgttaatattgccgtacaggaagaactgcagggacaaggtgtaggcaaacacatgattaaggaagcgatggaagctgcacgtagattgggatgccgaattctcgagattgggacgggcaactccagctttcatcaattgaagttataccaacgttgcggtttccgcattatcggggttgatcgtgacttctttgtgaggcattatgaggaagagattatagaggatggtatccgctgtgtggatatgatccgtatggccatagatctggatgctgttacagaggatgaaaagaaataggaagtatttgctggggtgaaatttgctgaatccaaagaagctgctcggataatttatgtctgggccagctttttgctgtgggtctcctgaagaaaaccccaattatttgttgaatgtgacgtcaaatggttaatgtttaacttgacggtttgtttttgcacataatggaccacaattcaattaaggaggtaaaatgggagatcgtatgcctattttgttgtaattaagcgttcgttgttctacccaaattgatcgatttattcgattcatctaatttatgcatcaattgaactaaaaataggaaatgctcctgagcgtaaaagtttatagaatagatagtagaacatggacttcacttgaagaagtggagaaagtgtaaccttcgaacggatcaggacagtattcgacatctgtgcgacggtatatacaatcattgttttactttgattttgaaaacgcagacaaaccttgacgggagcgtcggactaacgttactaccaccaacagcacgattattggacttcatgaaaaatttcgcttaaaatgttgaacgaacgcaaattacggcttagtcaatgatttccgtcaaaaacttatgactaaatcaagacggagggaacgtcgatgacgatcgtggaaggcaacaagaagccctgggaaagttactatggacccaatatgggatacgtacaggaacaatatgaattattcactcaagaccctggttcggttacaccggcttatcgtgaactatttgaacaatggggtgcaccgccgatgtctggcagggatgcacgcacaaccttgaattccggcaacgcccaatcggcttccggaagcgtagacattcaactattacagaaagcggttacagcgggtaaactggtatggaacatccgcacctatggtcatcttgctgcagatatagatccgcttggaatcagtgaagatacagacacatctttgctggaacctcagcattttgaattaaacgaagaagatctgaaagctttgcctgcttccctgatctgggaaggtgcagatgggcagacagcaaccggatgggatgcaatccaacgtttgcgtcagatatacactggacccatggcctacgaattcagtcatgtgcacgaagttcaagagcgtgagtggctgaatcgtcgtgcggaatctcggacatcaccggctccacttacgccgaaagaacgtaaggctttgctggaacgtttggttgaagtcgagcaatttgaagattatcttcacaaaacatttgttgggcagaaacgtttctccatcgaaggtaacgatgtacttgtgccgatgctggatgaagctgttcgcatcatggcagaagccggatcaagccacattctgatgggtatggcccaccgtggacggttaaatgtactggctcatgttttgggcaaaccgtacagcaagattttctctgaatttcatcatgctccgaacaaagatttggttccatcggaaggttcgactgggatcaactacggttggacgggggatgtcaaatatcatatgggtgccaaccgttttgtgaaagacggggaaactgtacaggcacgccttactctggcgaataacccgagccatctggaatacgttaatccggttgtacaagggtttgctcgtgcggctcaggatgaccgtcgtgaccctgggtatccgaagcaggacgtgacgaaggcagctaccattttgatgcatggtgatgcagcattccctggagaagggatcgttgcagagacgcttaacttcaaagctctgccaggatatcagaatggcggaaccatccatattatcgtcaacaatcgtctgggtttcactacagatagcagtgattcccgttcaacgtactacgcaagtgaccttgctaaagggtacgaaattccgattgtacacgtgaatgcggacaatccggatgcttgtattgcagccattcgtatggcagccgagtatcgcaatcgtttcaaaaaggatttcctgatcgacttgatcggttatcgtcgctacggccataacgaaaccgatgatcccgaaacaactcaacctatcgtttatgacaaggtgaaaaaccatccaacggtaagccacttgtatcaggatcagttgaaagaggaatcgattatcgatgatgcatccattacgagcattcgcgatggagtaacgaacaaattaaaagaagcttatgaccagatgaagaaaaatgaagtacatgaatattaccaacggaaaatcagtgagccggaggctgttacgattactccgactgcggtaccgcttgagaaccttcgcagcattaatgccgatctgctgaaatggcctgagaacttcaatgtgtatccgaagttacagcggattttgcaacgccggagcacttccctgaacgaaggggaaaaagtggattggagccttgcggagacactcgcatttgcaaccattctggcagatggcaagccaattcggattagtggacaggatgccgagcgtgctacattcgctcatcggaatctggtgttgcatgattcggagaatggagcaaagttctgcccattacatcacttgccacaggcaagagcatcctttgcaatctataacagtccgttgtctgaagaatccgttgttggattcgaatacggatataacgtatattcacccgatacactggtcatctgggaagctcaattcggtgactttgccaactgtgcacaggttatctttgatcagtttgtatcagcgggtcgtgccaaatggtctcagaaatccagtctggtcatgttgcttccacatgcgaatgagggtcagggacctgagcatacaagtgctcgtcttgaacgcttcctgcaactttgtgcagaagacaacatgacggttgccaacttgtcgagtgcttctcagtacttccacttgttgcgtcgtcaagcttccttgactgaaacggaagatgctcgtccacttgtgatgatgtcaccgaaaagtctcattcggaatccgcgtgttgcttcaccggcagtcgaattcagtgaaggcaagtttgagcttgtgctggagcaagccggactgggcacacagccggatcgcgtagagcgcattattttgtgcagtggcaagattgccattgacttggaagatgcttttgaaaaagataaagctgattggtcatggcttcacatcattcgagtggaacagctatatccgttcccggcagaagagattaaacgcatactcgcacgtttcagcaatgtaaaagaactggtatgggtacaggaagaaaacaaaaacatgggtgcctggacatacatggagcctcgtcttcgtgaagttgcccctgaaggcacaaccgttagatacgaaggtcgcccggaacacgcaagtccttccagcggttatcagcttgtgcatagtatggaacagcaacagattattacatctgcgttgaaacaaacgacgaagaataatattccactggggaggtaacagctgtgagtgaaattaaagtacctgcaatgggtgagtcaataactgagggaactgtatccagatggatggttaaagaaggggataccgttaatcagggtgatgtgcttcttgaactggaaacggataaagtaaatattgagatcagcgcagaagaaagtggcgtgctggagaagatcattcgtcaggaaggagagacggtcgagatcggtgaaacgatcggtacactctcagctggttctggaggaggaagcggtgcacccgcttccgaaccagtagctgaagagaaaaaggccgttactcctgcacctgaagctccaacaccaccatcggcacctgttgcggcagcaccggagtcatccgatagtgccaagacggcttcaccgtctgcccgtaagcttgcacgtgaacgtggtatcgaactggatcaggttcagagcaaagatccgattggacgggtataccaggatgatgtgaagagccataacaatcaggcgcctgctcctgctgctccacctgcgagtaaagctccagcagcaccaagtgctccggcagctggaagttctacctataccaaaccagtggagcgtcagcggatgtctcgccgtcgtgcaaccattgcgaaacgtctggtagaggctcagcagacagcagccatgttgactacgtttaatgaagttgatatgactgccatcatggatgtacgtaaacgccgtaaggacaagttcaaagagaaacatgagatcaacctgggcttcatgtccttcttcaccaaagcggttgtgggggctctgaaaaaattccctacaattaacgcagagattgatggcgaagatgttgtactcaaaaagtattatgatatcggcatcgccgtatctgcgaaggaaggactggttgtaccggttgtgcgtgatgcagaccgtctgggctttgccgagatcgagaagagcattgcggacctggcatccaaagctcgttccaacacgctggcgttatcagatctgcaaggtggaacgttcaccatcaccaatggtggaacatttggttccttgttgtctacgccaattctgaatacacctcaagtgggtattctggggatgcataagatccagcttcgtccagtggcgattgatgcagaacggatggagaaccgtccaatgatgtacatcgcgttgtcctacgatcaccggattatcgacggtagtgaggctgttcgcttcctcgtaaccgtgaaagaactgcttgaagacccggaatccctgttaattgaaggttaatccataacgtttgattatagctattattcatatcgcttaacaagaaaacccctgaactggtgcgcagcgtgagctgtacatccgattcaggggtttctttttgctcttgatatgtctccgactctattatatagagtcagccgtctcagtacggttcaacggactagagtgtgtattcgggccaggggtattccgctctaaccagttcacaacatgctgagccacttctgttcggttgatctcatgcagcatttcatgccgtccatccggatacaggcgatactcaatgttctccagccgaagcttcttatactgcgagaccagattaagaacgcctttgccatgaagtccgacagggtccttctcacctgagaacaggtatacgggtttgtgtttgggtatgcgctccatattgtgttgaagatggacttcaagcagcaatttgaagaagtcgcggaaaaagcctgctgtacagacggctccgcacagggggtcatcaatgaatcgctgaacctcttgtgagtcccgggacaaccaatcaaacggtgtcgttgcagggcggaaagagcggttaaatccaccaaatacaatcgcgttgagcagcatgctgggatgggtagccccctgaatgccgcactgcaagaaggctagcttctctccaaatcggagcagaccgcgtctgccgtttgtcccggataaaataaaggcatggtactgctcatgaccagcgtacatgagatgttgtaccaagaatgagcccatgctgtgtcccattagaaataggggcaccccaggattctccttggcggctacttcgcccagattgatcatatcactcgccatccagcggaaggcatcgataccagcattaccaagcaacttggcattctccacagttttgccatgaccccgatggtcatttgcataaaccgcatagccattttgggtaaggatgtcagcaaattcggcgtatcgggctgctgtctcgcccatgccatgtgcaatttgcactacacctttaacgttacaatccggatcgggaagccagcggtacacatgaatacgggtaccttcactagcgaccaaggcaaaggtagattcctgcatctcgtgtaattcctccttcacaggtcacatataagcttgatttagggcagataagagcgaagaacagtggtattcccgttcaatgtataagaacccagattggctggcaagagataacattgtccagctttcaattcaatgctgtctgattcagcatgtgcccactccaaagttccttctccttcacagacaacgagaatcgtgaagctgtcaggattagtggagagttcccaccgttcagtcacgatccctttttccaccacaaaataagggcattccgcaagcttgagccattcaccaggagtagcgttatttgttttcatcgttgaggcacctgcgccctcataggcggtgacatttaatgagtcttcaacatgcaactcacgtggtttgccatccagccctggacgattgtaatcgtagatccgatacgtcgtatccgagttttgctgaatctcagcgacaaccacacctgcacagagcgcatgcactgttccagcagggataaagaacgtatcaccagcttctacaggtacctgacgaagggtatccatcaccgtgccgttttccaatgcttcttttaatgttgcccgatcaacgccttcgttcaagccatagatgatgtgtgcgcccggttttgcgtcgagtacataccacatttctgttttgccaagctcgcctggaggaagtgcctcataatcgtctgttggatgaacctgaacggacaggtcatcgttgcagtcaagcagcttaatcagaagggggaaacggccgcctttttcagagacacctttggttccaagccattcggtgcccagttgttcacgaacttcatccagacccttgccagccagtgctccatttaataccttggttgtaccgttgggatgatccgcaatcatccatccttctccgatatgtccttcagggggcgtaaggccgaattgctccagcgcacgaccgccccacacacgttctttgaactcaggttggaattgtaatgggtatggcgtagacatcagtaatctctcctctagtatatgaaatggtggatcgctttaatcagtcatgggcatgtagtcgccatgagcaaacaagtgaatacgtttgcatatgtagatgtagaacacagatcgcagtaagaagaagccgttaatagctcgccctgcgattgtgtctagtttattgtatttggtgaacaaaggaaattattttttctcgattccgatcagaaaaggagaagtttctcgctgcaattggcgatagatcacaacctgtgcctgttccaccggaagggcagaggaccagtccaatacagcttctgcttcctgtgcccctccgtcatgaccggggtagaggacaaccgtaatgatgccgcgaggacgtaataaagcgagtgcagcctcgagtgcagcgatcgtgctgtcagtctcggtgatgatggaggaatctgcactttctgaaggcaggtaccccagattgaacataactgcaccaaccgtaccaagccatgactcaggaactgcttctgccattcgatcatggcttagttgaagcatggagatggagccaagcttggcttcatcattttgttttcgaatccgggcctgtgccagcgtgagggcttcactttgaatatcgaatccaatgacttgaccacgcctgcctacttgttgtgccaaaaatagtgtgtctgctcctgtacccaccgttgcatctatcgccagatcacctggctgcagacgggaagcaatccactgatgcgcacagctgagaaccgaaagaaagcccatctatgctcgcctccaatacttaccttgccatgaatcccgctctcgcagctcacgatcaatggagtttaacacttcccatttgttcatggaccacatcggtccaatcaacagatcacgtggtgcgtcgcctgtaagacggtgtacgatcatttccggtggaagcatctccagtgtatctacgatcagcttgatatactcgtcctgatccagaaaacgtaaaagaccagcttcgtattgcttcaccattggtgttttgcgcatcagatgcagcaggtgaatcttgattccctgtacatccatattggcaactgcccgtccagtgtccagcatcatctcatgtgtctcttgaggcagaccatatatgatatgtgtgcacacacgtatattccgtttacgcagtttctcaaccgcttcttcataacacttcgtgtcgtgcgcgcgattaatcaatgttgatgtggaatcatggatcgtttgaaggcccatctcaacccacagataggtgcgttcgttcagttcagccaaataatcaacaacgtcatctggcaaacaatccgggcgagtggcgatggacaagccaacaacaccgggttgctcaagaatttcttcaaaatattcgcgcagctcctcaaccggagcatacgtattcgtataggcttggaagtagccaatataatgggctttaggccacttgaggtgctgtttatctcgaattgtattgaactgagtgaccagatcttcacgtctgctgccagcaaaatcgcctgatccacgcgcactgcagaaggtgcaaccacctttggcaatggaaccgtcgcggttgggacaggtgaatccagcatccagcatcactttgaaaaccttattgttaaattgatcgcgcatctcataattccaggtatggaatcgtttatctccccacaggagaggggactgtaatgcaggtgcattcatcttcagggtactcctttggctgtcgaattaccgtaatcatacgtgaacaaaagaagaagcgctatgcgatttccgtcatagacgatggatagcgattataggtgtcttcatgaactttagcattttgcattattcgatttcaatcgctcacgggtacaagatatggacaggaaaaagcatcctgatccatatcttgctgattggaagacgcttatgggatttatgcaaaatgctcactttatcattgtatcaaaaaactaaaaaaaaagggaatcgaaacgcaaaaataggccgtaaaatcaagggtttccccttgctatagtttacaccttatgttatatttaaatcagcgtcagacaccatctaatgggtattattcatcatagcattggaatcaacgttgacgtcatggaccatactataccgtgaggtgatatgaatgaattcccaagttaaaaacaatgaattgaatcatgtgtctgttgaattgacggcagaagaagcactggctttaacaggtgttcgttttaatggaaatccgaaagtgaaagcggctgcaagacaaaaagttcgcgatgctttcgaaaagacatttgatttttcacaccaagataaggtagactatgaactactaaagtagttggaccccaattccaaataaatcgaagagggaatctttgagatttgcccaaagtggcagatccgaagattcccttttcattgctctttacaatttgccagttcttcggcaaaataagtctgagacaagtatgggacaaacggaggaataaaatgcgtttacgtggcagaaaagggataagagaaaatttggagcaacaagttgatcttgttgtactggacccgaagcaacataaaggaaaatggtctgaactgtatggcaatgaccatccgatcttcgtggaatttggtatgggtaaaggtcaatttatcagccaaatgagttataaatatccggaatttaatttcatcggtattgatatgtatgatgaactggtgcgtcgtgccagtgagaaagctcgtaatgcgtggagtcaggctgatgtggagacacctccgaacctgaagcttgcgctggcgaatattgaacagatcgaagaagtttttgaaccggaagaactggaacgcatttatttgaacttcagtgatccttggccaaaagcaaagcatgcacgtcgtcgtttgacgcacccgcgcttcctgaagaaatacacggaattgcttaatcccaaaggtcagattcatttcaaaaccgattcggagacgctgtttgatttctcactcaacgccattgccgacttcggcctgcaaatgaccaatatttctttgaatctgcatcgtgatggtttgaatgaagaacatgtgatgacggagtacgagcagaaattcatgggtaaaggtatgaacattcatcgggttgaagtgattgtgggtgaagaggccttgcgtgagtatcagcagacacgtctggacaagtataaagttcgtgaagcttcggatgagtctggcgaagatcaggaacaggaataaatcgaaatctaacttaaactcattaaagaagagcgacacatgaggtgaatgattcattctcataggtcgctctttttttgcattaacaatccatgtgcaatgctccataaactcaagtctggtatggtatgatttcaaaagttctctgaatgaaattctttgcggcgataatcgtttggtgtaaccccgttaaactttttgaacatgcgatagaagtatgaactgttggtgaatccggttctctcggcaatgtcggcaacggagttctccgtctccaccagcagatgctgggccttggctattcgggtctcgttaatcacgtccgtgagccctttcagggtgagctgtttgtagagcctgcttacatagatgggcgacatgcccaactcatctgcgatagaagttagacatagattggggtccgcatagtcccgctcaataatgccattgattttacgaatcaattcttcgtgcttcagcgtacgtttctcctcgactttggaaccaagctcatcaaacatccgatagaagtgttcatgtacttcactgatgtcttccgcgtctttgacaggcaacattagaccatccgagactgaatcaagcgtgagttgattattcttcttgagggtatttcgtacatggttcagtgtcatcgtcagatgggataaagctagctggaagacggtaaatggatatgcggctgtctcgccgacgatgtctgcatagacttgttttgcttctcgcgtcttacctgtcattagatgatcaacaagctgtctttccttacctgctgggaatgcgtactccttggtgtgataagccatgatgtcagaggtatagatcagacagcccggtcccatgaacaaacgatgcagtgaggcttcggctgatctggtgtaggatgcaatactgtcttccaatgaatcttcttccgtgccgatcgtacaggagatggagcatttcaaatgggtcattacagctgcctgcatcatacgtagcagctcttcgatccggttatgagcaggttgctcaagttcatggctttccgctttttcattgaagatgagtgtgatcagatcaccgcccatgtccacagcttccgcattgtagtggagatcggctgtctcggtgcagatgttcatcatcgcgtattttacaagctgggtctcatcacgatacgtttcgctgaattcggtaaaatggtcaatacgcagtaataccagtctggatgcacgctgaacatcaatggaggaaccatagaacttcatccgttcttccagcatacctccagttactgtttcgcggccctgtagggcccctcgtagaaaatcctgccgtaacaaatgaagactgccacgtcgctctgcttccatcacacgtaaacgaacaagcaccttatcaatagggtgatatagttttcgggacacaaggtaagagagcagcaagcctgcgaagagaagtccaacacaaaacagaacggtatgtgtgcgcatactccgtatatctgaggtaatcagatcataaggtgttattcttacataacgccaacccaggtcatcgggagcggtataggtgatgagcgacttttctccgtcgactttctcggtaaagtaagctgattgccccgtatcctggataattggcttcataaaagcttcgctggagagatttttcatcaatgcacggtcgccaaagtcagataaaaggtctccattctcatttacgataaaggtcttgcctggttgatccacagcattcatattgggactgagccaatcatccttgatattaacgatgacagcgtagtttagtttggcattgtcattgatcgtgtcataacagagataggtgtagctgttaacctctgtcgcttcagtagaaccgacctgatatgtacgcgggatgggaacaaaaggtttatagtcatggaagttctggaggatacttttaatcccctgatcgtcgatctccgagatggactgctgcccattgcgcacgtcggaactgataaagaattcattacttttggagttatatacatagatggattcgataaagggaagggacatacggtagttgtctagctgctccatcgcggatgtgatttcatagatatttggtttggaatagagcagtaatgaagagatagtgtagtcctgataaatctgatatgacaatgattttgcagtctcggtcattttggccacttcacggctggtttgagtaagactgttcatatctgtacgatacacctgacgaagagcaattcgattatagttgacgtacaaaatagaagaagccacaagtaaggtagcgacggtactgataataatgccgatcagaatccgtgtgaagaccttctgactgtcctctgaacgtttacgcattctgtttccccctcagacctcctattttgggtgaacaacatagaatttcatatacatatgtgaggcttcatatatcgatgtacagaagagcaagagtaacttgaattatatattatgtatgcgtttacatcaatgctggacaggccattttgcctgttttctctacataaagttcaactttcgctggattgttcactaggtgtagcctatgcacgatatcaacatttgtgaacggatgtgtgtgaatgtctgttcatttcatggttcgttcattttgttcatagttcatttcgcagaatcgttcattttctgaagggaagcttcagtatccgtgagtgaagagagcatctacaataaaaagagagctccaccacgcagcaccgcaagaaattcgggagggatcgagccatgctcaaagaattgaacaaaaacaaaatcatgtttctgatgctgttgcccacgctgatcttttttctgattaactcgtattttccgatggtcggcatctattatgcattcacccggtatgattttgaaggcggattatttggtagtccatttgtcggtctggagaactttaagttcctatggcaatccggaatgttgctgaagctcacaaccaataccgtgggttacaatctcgccttcattatattaggaaacggtctggcgatcttctgtgcgatcatgcttagcgagatccggggcaggttattcaaaaaaatcacgcaatccgtcatgttcttgccgtatttcatctcgtttgtactattaagtgtaatcgcttacaacatgtttaactacgagtcgggttttgtgaacacggtgctcaaacgttttgaggccggcccggtcgacatttataacacaccctggatctgggtgttcctgatcatcatcttttatctgtggaaaaatcttggatacagcatggtcatctatctggccgccataacgggtatcagtgacgagtattatgaggctgcccgaatcgacggggccaatatatttcagcggatctggtacattacagtacctatgctgaagccaacctttgtcatcctgctgttgttctcgcttggcagcattatgaaggggcagtttgacctgttctatcaactgatcggcaacaacggggtgctgtacaacgctacagatattattgatacgtatgtgtatcgttcactgaaagtcacgtttgatatcgggatggcaacggctgctggtctgtatcagtccttgtttggattcattttgatcatgaccgtcaactatattatccgcaaagtaaatgaggactacgccttgttctagaacgcccgcagggcaggagggagaacaatcatgaacacgccaatgaatactcacactcgtacgaatacccgtctcagagattcggaattcactttcatgtttcaactgatttcctacagcttcatcatcattttatcaatcatgtgcttgctaccgttcctgctgattttatccggttcattcagcagcaacgagtccattgtgagggatggttatcacctctttccaacggacttttccctggaaggttacaaaatggtgttcaaattcccgactcaggtactcaaggcttatggggtaacggtctttacaacggtggtggggactacgctagggctgttcctcatcacgatggctggatttgtgctccagcgtaaggattttaaatatcggaacacgttctcgttttttatctacttcacaaccctgtttggtgggggacttgtgccttggtacattatgctggcgaactacttcaatctcacagatacgtacaccgtacttattttcccggggttgatgacgccattcctcattatcctgatgaaaaacttcattcgctcggcagtgccggatgagttgattgagtcggccaaaattgatggagcaaatgacttccgcatctatttcagcatagtgttgaaactggcgatgcctggtatcgccaccgtaggtctgtttctggcactgggttactggaatgactggtttacctcatccctcttcattaacaacccggatatgtaccaacttcaattttatctctacaacacgatgaacacgattacattcattgaccagatggcaattggcacagggatcacactcagtcaggatgtgcctaccgaatcaaccaagatggcaatggctatcgttgtaacgggaccgattttgttcctgtatccgtttgtacaacgttattttgtcaaaggactcaccattggtgcagtgaaaggttagaacgtgaacgcgctgtgggtgtcaggccactgatatcatttcaggtctgaaacatggcgagtctgcgctaacatataaaggttcaccacaaaaagggaggatgcgtatgcgtaacaaaacaattcggcacctgtctctggtacttgccctgatgttgttcgctggggtacttgccgcatgtaataacggttcggggggatcgacgcaaggaagtgagcagggaggaacatccgggaacaaaggcgagaaagtgacgcttcaattttacatgcttggggatgctcccaaagatctgcctgttattgaatccgagatcaataagctggcggaggctgatctgaacgtcaatgtgaaattcaactacacctcatggaccgactgggatcaaaaatataaactgctgctgtcttccggacagccgatcgatctgatcttcacagcggattggacattctatcagtcctatgccaagaagggggcgttcctgccactggatgaaatgttgcctacagcagcgccagcgctgaaagctcatgtacctgatgatatgtggaatgctgtcaaaatcaatgacaaaatctatacggttccatccacttggattgagtatgtaaccgaggggattgcgtaccgtgaggacttgcgcgagaagtacaatcttccaaaaccggaatcgttggagacgctcgaagcgtatctggagggcatcaaagccaacgaacccaatatgattccgattgcggatagcaatgccaaccatacccatggtattcgtcaattgacatccaagctggttaatacagcaggtcaacttccatatggactggatattatgtatgacacaccaacaaccgtgacgtcctactggggatcggcgcaacacctggaagacctgaaaacatacaagcggtggatggataaaggctttttcccgaaaaacgtactgaatgtaaaggatacttccaactcattgctgcaaaatggaaaagcggctgttgttctgtccggggagaacccgaacaaatttaatgcagatgtcatcaaggtgcagtctactcatccagattggaaactggcttatttcccgtacccgaatgcgaaagggtttgcacaaccggttcacccgatccacaatggttttgcgattccgcgtagcagtaaaaacccggaaaaagcattggcattttatgagaaactggtgacagacaaacgatataattggttgactgaatacggcgttgaaggcaaaaacttcgaggtagataatggatactacaaaatggtaggcgatgcacaaacaaacggcttcccgcgtgagggcatgaatggctgggcttggcgtaatccggaattcatgctctatgataaaacctttgatgatgtcctgaccatgtttgaagatctcgacaaaatcaagaagccagatatttataccggatttgctgaagactggacaccgtaccaagccgagaaggctgcattggaacaagtagaaaaacaatatctgtatccgcttaatgtaggtttggtggcagacgtagaggctggattgaacacatttatggagaaggctaaacaagcaggattggaaaaaattcagacagaatacaccaagcagtggcaggagtatttgaagtcagcaggcactcaatagtttgtactttccttcataaagaaaaggtgccttcaaattcgaaggcaccttttcaatgtggttgcaggcttgtttgaagccgttggttagaggcatgattggacgaagaatacgggaagcgacatcctaatgggataaattcataaacgggcctcttctgcggatgaaggacgaacgtcctccagcagatcgataatactttgagcgctctgcattggatgaaccttggcgatttccgccagatgacgtttgcgtttacgtacaacatccgggtagtgatgcaacagcttgttcatccatttaaccactacgtcgggcgaagttatgggttctcccaaccctcttgccgtaaaataatggacgttttcttcttcctgaccaggtataggattgtggaacaacatgggaattcctttggccaagccttcactgcatgtcattcccccaggtttggtaatcagaaggtcggatacttccattaatttgtccacttcgttggtgtatcccataatgtgaatgttttctttgcgatacatggggttctgttccatgctgatccgtgttttatcgttgcgaccgagacaaaaaatgatctgaatatcttcatgccagcgtgtcagcaacggatggaccagcttgtcgctgagcattccccaaccgccgcccatcaccagtacagtaggcatgttcttgaggttaaatctgcttcggatctcttctcgcccgggatgctcccaaaaatttggatgcaccggaatgcccgtgactcgaatgttgtctgcaggtacgcctcgtagcattagtttggacttaacctcatctgaagaaaccagataaaggtctacttcacggttaatccacgtcccatgtgcatcatagtcggtgatgactgtgcataggggaacctgtacacccagacgtttcagtctggatatgacagcacttggaatcggatgtgtacagacaatcgcatcgggacgtaactggcgcacaacgctgcgtgtgtgtgtatagaacagtttatgcaacgccagtgtggtcagcctgttcaatgattttttatattggtgtctgtatacgtatccgaaaagtttgggttggttggtaaccgtttttttgtatgctgttataatcagaggtgcaacctttggatttaagaaacttcccaattcaagcacttttgtctgcacgtctggcgagagctttcgcaaattgctggacagtgcataggcggcttgagtatgacccgtaccaaagccttcagataatagtaatactctttttttctccacgcttacttcacctgttcctgctaggtttttctgagtctaacatatcggctttaagaccagaatgcaactgttgcaagtgcgactaaagtacctattgtggcacccgccagaacatcggaaggatagtgtaaccccagataaattcgagagaatccgacaataagggccacaggcaacaatattagcaataagattggatcagtggtcataaagggaactgtgaccgaaaaaatggcagttgtgtgccctgaaggaaacgagtgatccgtcaggggattacggaacgtaattgtatccggcaaggccagataaggtcgaatgcggggatacaattttttcgcgatggctacagggatgtggctgaccgcaagggcgatacatgcctggagtcctgttgtgctccatggagctggagcaagcagccagattaacaacgatattgcaatagatgaagttgctccacccagatgggtgaaataatacagccaaaaattcataaaacgattatgaagtcggccgttgatccacataaaaacatttcgatcataatcttgaaactttaagaataaacggctcatattggcctcctgccagtcaggccgcccgtaatggcggcattatttccggtgattttctgcatccggtttcgtcctgattagtatataaccgattttcatgaacttgaggttatttcaggtatatgtttatcatatttttaaatgttgtccttttcaagaagaacccatgtaaagaaagtgaaattcatgttaaagagtggatatatacccatcttaactttttgacttgggtcagccaaaaaagatacaatgattcaacatggctgaaatgaggtaaaaaaaatgtgagttctgtttcaaactttttgaggtctgtttgcgttatttgttatagagcctctgacgaagaataacatgctgatgaaaaaagcagggactttagaaataaaaatcaagtaaacggctgaaaataagatataacaggcatgaatgcgaggttgtggtatcacgaagtgtctattcagcgtttaaagatcacatttctgcttcagaaagtggaattggggttttgacaaatgactgaaaaggatacagaatcgataaagcagccaactgatagcaaccaagctttgaaacattgcctgatatattcacgtagtacacaaaagaacagggtcatattctgcagatcaaaaaaaaaataaattgcagaatcaggaagagaaatgcttgagtaaactgggttttgaaaaaaagggggtaacagagaacgatgttggacgctatattcgtcacgatgcaggtcattctggcactgctagccgtgtaccaattcacgttttcgctgttcggtctgattaagaaaaagaaaaagaaacattatccggcgacaaaatcattcgctgtactcgtcgcagcacacaatgaggaacaagtcattggtgccttgatggagaacttgaaacaacttgattatccggaagatctgtacgatgtgtttgtcatctgtgacaactgtacggatggaacggctcaaattgtcagagagcatggattaaacgcctgtgtacgtaccaatgccgatttaagaggtaaagggtacgccatcgaatggatgcttaagtacctgtggaaattgccacgtcagtatgacgcagttgttatgtttgacgcggataacctggttgaccgtaacttcttgcttgagatgaatgatgacttgaacaatggttcgcgtgttatccaaggatacattgatacgaaaaatccggaggattcctggattactgcagcttacggtgtatcttactggtacatcaaccgtctgtggcagttgtctcgtcataacttgaatatggcgaatttcctcggaggaaccggaatgtgctttgagaccaacctgttgaaggaaattggttggggtgcaacaagtctggttgaggatctggagtttacgatgcgcagtgtgcaacgtaatgtgtatcctgttttcaactatgacgccaaagtatttgatgagaagccattaacatttaaagcttcagcgagacaacgtctgcgctggatgcaaggtcactttacagttgcacgtagatacttcttcccgctgttatggcagtccattaaggaaagaagcctggtgaaatttgaccttgctatctacggagccaatgtctatgtggtgttgcttacgttcctgatgacggctgtgatgtgggtagacatggctatattcagtggtccgcacattgctaatatttatggatacttcccgttatgggttgggttcgtggctattggtttgaacattctgacgttcctgttgtccatggcgctggagaaggttacctttgccaaagtttatctatatctgattttgttcccgatctacctgctgtcttggtacccgattacgttctacgctttctttacgcagaacaacaaacagtggagccacactcaacatacacgtgttgtacggttggatgaggtacagagcaagcaagggtaaggaacatgcgtgcgatactttgttgacatctgatataacaaatgtataatttgcgaaaaaaaagttgtgaagaatgttgacaatgtgtttcatgggtgatatagtattcaagtgccttaaaacgaatagtaatggaatcacaagcagaagtccgacttctcacctgatcaacaaacatgttggctggtcaacgatcccaataatttatgaagtgtatactcatgaagaattgtgttgattacagggatgtcggtagcttgaccggcatcccttttatttttgtgtaactggatattcaaaatgacctggaggtggacgattattagtaaagatcacatgattaatgatgagattcgggcgaaggaagtacgccttgtcggagctgaaggagaacaaattgggattacgcccattcgcgaagcactgcaaatggcgattgacctgaatttggatctggtcaatgtggcaccacaggctaaaccgccggtgtgtcgtattatggactatggcaaattccgctatgagcaacaaaagaaagataaagaagcccgtaagaaccagaaaattgttgatattaaagaagtatggttccgttccaatattgaggagcacgattatcaaacgaagcttcgtaatgtagttaagtttttgaacgaaggcgacaaagtgaaatgttctgttcgttatcgcggacgtgaaattgcacatgccgcgattggtcaacggattttggaacgcgttaaggtagaagttgcagaactttgtactgttgaacgtcaaccgaaattggaaggccgcagtatgatcatgattttggctcctaaagcctgataacattggaggaggaaacacaaaatgcctaaaatgaaaacacacagcagtttgaaaggacgcttcaaaattaccggttccggtaaggtccttcgttacaaagctcacaaaaaccacttgctttcccacaaatccaaacgtgctaagcgcgttctgaacggtaacccagttatggctgccggggatgttagacgtttgaaacaaggcttggctaacttgaaaggctaattttaattagtacattccgtatgggggatcggctacggccgtacacataccacggatacatttatatttatttgggaggttctttaatatggcaagagtaaaaggcggttttgtagtacgtcgtcgtcataaaaaggttttgaaactggcaagaggttatttcggttccaaacaccgtatttttaaaacagctaacgagcaagtaatgaaatccctggtatacgcataccgtgaccgtcgcaacacgaaacgtaacttccgcagactgtggatcgttcgtatcaatgctgcagcacgtatgaatggtttgtcttacaacaaactgatccatggtttgaaacttgctggagtagacatgaaccgcaaaatgttggctgatctggccgttaacgacatcaatgcgttcaactctttggctactgtagctaaaggcaaaatcaacgcttaaattgtatgatacaagccgccgtacctatatggcggctttttttacggcttggaagaaattcgaagatgaatctctgaatgagtagagcgaataggctatagtctggaagggaacaatgaaactagataactggtgaataacgatccatgggaatacataaaatacgaacggtgaaataatacaaataaaaacaggtaaatccctctcatcactaaagttcgcgatatgtttttgttatataacatcacatcgttgtaacgttagtgtgttaaatcgctaaattattaagcgttttcaataaaaaaagaacaaaaatatgtgatatttggtgatgaaacatctggattttaacactggttgattgtataatcacctctagtaggctagtcctagatttttctctccatgtcataatgttcggtttttcgacagatgataggatgcttcaagggtgagaatgcgcttttaatgtcgaagaaaccatacattctacataaaagtcattcctgctatctgttaaccgttcaattgtaggctggattggaatgagggatatatcattaagggggaaaaagagaaatgaaaaagatgctcagcttgtctttggtaatgttgctggcggtatcggttatgctcgcaggttgcggtagcaaaccgaaagaagaaacaaatgccggaggagatacaggtggcacatccactgaagcgaaatccgacctcaaaatcggtatggttactgacgtaggtggagttaatgacaaatcctttaaccaatccgcttgggaagctctgcaagcgactgaaacagaaacaggtactgctgttaaatacctgcaaagtaaatccgatgaagagtacattcctaacctgaacgaattcgttaaaggcggatatgatctgacttggggtatcggtttccaattggctgatgcaatcaaaactgtagctgagcaaaactctgatgctaaactcgcgatcatcgacagtgttgttgatgctcctaacgttaaatccgtaacatttgctgaagaagaaggatcttatctggttggtgttgtggctggtctgacaactaaatccaacaaaattggttttgtaggcggtatggaaagcccactgatcaaaaagtttgaagtaggattcagagaaggcgttaaagcagttaaccctgatgctcaattcatttctaactacacaggtgcatttgataaacctgacttgggtaaagcagcagcagcaacactttacaatgaaggcgtagatattatcttccacgcttctggcgcaacaggtaatggtgtgtttaacgaagcaagtgctcgtaagaagcaaggtcaagatgtatgggttatcggtgtagacaaagaccaatctcttgagtttggtgatgagatcactttgacttccatgatcaaaaaagttgacgaagcagttaagcgcgttaacaaagaagtagttgatggtacattcgctggcggttccgagaacctgactttgaaagaaaacggcgtaggtattgctgatacctctactgccaatgtatctgctgatacacttgctaaagtagaagagtacaaagaaaaaatcatcagcggcgaaatcaaagttcctacagagtaattttgatctaagttgcaaatgaataatcattggggccggtcttgaccggccttatgattgcaagaacaggaacatttgatcaagtcatcataacaattgtacaaggtcactgtgcaccaacgctccggtaggagcttttcttaagataatggaattgagttgttcttaatgagctgaaccattcgattatcgcaagaaaaacttcagctaagcgcggtctgtcttctttgaaagtacgtcgatagacgtttttttttacgtttgcggaaccacactatatcagttataagggtgattacatgggtgcagcaacccccgtcgttgagttaaaacaaattacgaagcgtttcccaggcattgttgccaacgacgccatcagccttcagcttcgtaagggcgagatccatgcgctactgggcgaaaacggcgctggtaagtcaacgttgatgaatattgtatttggtctctatcagccagatgaaggttccattgaagtgaatggcaagcctgtcatcatcgacagccctaaccgagcgatcgatcttggcataggcatggtgcatcagcattttaaacttgtacagccgttcacggtaacagagaacattattttgggatctgaaccaacgaagggtctcaatattaactataaaaaagcagccgctgaagttcagcgtctttccgaacagtatggacttaaggtgaatcctcatgccaaaattcatgatatttctgtcggaatgcagcaacgtgtagagattgttaaaacgttgtatcgcggtgcagacattctgatttttgacgagcctacagccgtattgactcctcaagagatcaaagaactgatgatcatcatgaagaagcttgtagctgaaggaaagtccattattttgatcacgcacaaactgaaagaaatcatggaaatctccgatacggttacgattatccgtcggggtaaagtgattgattcggtcaaaacttcggaaacgaatccgaatgagctggcagagaaaatggtgggtcggaatgtcacattcaaagtggacaaaaaaccggctacacctggagccaatgtgctcgaagtcagtaaattaacggccaagaataaagaaggtatttcggttctgaaccaacttaacctgaacgtacgtgcaggagagattgtcggaatcgcaggcgtggatggtaacggccaaagtgaactgattgaagcccttaccggacttcgtaaagtagagagcggttcgattcttttggagggcaaggagctgtccaatcattctccgcgccatatctcggagtcgggtgtagcccacattccggaagatcgacataaacacggacttgtacttgatttttcagtgagtgaaaatatcgttctggaatcgtattataaagcaccatacacccgtaaagggttccttaacttcgatgccatcaaacagcaggcgaagcggcttgttgaggcatttgacgtgcgtacaccaagcatcgagaccaaagctcggtccttgtccggaggaaaccagcaaaaggccattatcgcccgtgaggtagataaaaaccctgaactgcttatcgctgcgcaaccaacacgtggtttggatgtaggggctattgagttcgttcaaaagcaactgattgcacagcgcgatcaagggaaggctgttctgctgatttcatttgagcttgatgagattatcaatgtatctgaccgaattgctgttatttatgaaggccagatcgttggcgaggtgctgccggaagaaaccaatgacagggagctcggcttgatgatggcgggcagcacccaaaagagaggtactgcgcatgaataacgtattgaaatggtttacccgagattcatttattttgcctgtagtagctattattatgggtcttattctcggtggagttgtcatgctgattggtggttacaatccaattgaagcctatggtgcattgttcaccaaggtatttggcgacatgtacaactttggtgaagcggtaagggaaatgacgccactgattatgactggactcgcatttgcatttgcatcacgtgcagggttgtttaacatcgggggagaaggtcaatttctcgttggtatgaccgctgcaacatttgttggtgttaagtttgcaggtttgccgatctaccttcatgcgccactggctttgattgccggtgcattgtttggtggtctgtgggccgcgattgctggttatctgaaagcagcgcgtggggtcaatgaagttatcagtagtatcatgttgaactggattggtctatatctcgccaaccttatcgttcgccaattcttgctgttgaagggcgagaatcgttccgtggatatcagcgaatcggcttcgattagtttgacatggctctctgagctgatgggcaattcccgtgtacacatggggacgttgattgcccttgtgatggctgtgctcttttatatctatatgtggaaaacaaaacaaggttatgaaatccgcgcggtaggttacaaccctaatgccgctgaatatgcaggtatgcatgttaaccggaatatcgtaaaagcgatgtttatcagtggtatgctagccggtcttggtggtgcattccaggttcttggtgtgttccaataccaaaccgtaatgtcgggttcaccgggaacaggctttgacggaattgcggttgccctgattggtttgaatcatccatttggggtgttattgggggcggtattgtttggtaccctcacgtacggatctgcaggtatgagttttgctgcggatgttccgcctgagattattcggattgtgatcggttcgattatcttcttcattgcggcacaaggcatcgtgcgctggatacttaaaccgttctattcgaagcgtaagaaagagaaggtgttgtagatggacttgttgacaattgggcaaattatcaatacgacgcttgtctttgctacggcattgatttttgcatcactcggcggaattttttcggaaaaatcaggtgtaaccaaccttggacttgaaggttttatggtctttggtgcctttgcagctggaatcggggcgcattatgctcaagaagcgggcatgggcggaacgacatcggcctggatgggggttttgctcgcgattgtattgggcgtaatggtatctctgattcatgccgttgcgtctatcacatttaaggcagaccagattatcagtggtatcgtcattaactttttggcagcaggaagtacgttgtacttggttaaactgttgtttgaaggttctggtgattcaccgttggttcaaggcttcagcaagtttgatgtgccattgttgaaagacattcctttgcttggagaagccttcttcaagaacgtatatccaacaacatatctggccattctgttcgtattcctgacgtattacatcatgttcaaaacgccatttggtctgcgccttcgttctgtaggtgaacatccaagtgcggctgatacagttggtgttaaagtgcttcgttatcgctatattggcgttatgatcagtggtgcacttgcggccattggtggagctgcgattacgttgacgactacgggtacattctcacacaatacggtttccggccaaggttatattgccattgcagctatgatctttggtaagtggaatccgattggtgcctttggtgcggctgtcttctttggattctcacaagcgatccgaaactatgtacagttgtttgaatggtcacaaagtattccccaggaaattattttcatgttgccttacctgcttaccatcatcgttctcgttgcagcggttggacgttcttcggctccgtctgcactcggtgaagcatatgatccggggaaaaggtaacaaccttttgtatatcagtttagctattcagagttttgataaagggtccgccttgtgcgggccttttttgttttcttgagcgtcaccaagccacttttacatgcttaacttggttctcatgcagatacccatattttcaggtagggacaaagaaacaggcgaattcagtgatggacgaatacactgttttgaacgatccgaggaggaggggaaagtatgaaacaacaagttacgcgtgatgaagcgatgaaattaataggcaaaaatattgttgcaatcaaaaaagacggcactcgggttacgggaaagctgttgaaagtatcgggcaacaaactggtactcaagcgtttgaatggcaaaaaagtacgtacaaaagcgattctgccattagtattgtttgatctgcttgctattgccacactgccttatgcttatggaggtggtcccggcttcggtcccggatatggacctggaccaaaaccaggccctggatatggtccaggctacggaccgggatatggacctggaggtcctggtggcggatatggacctggtcctggattcggcccttatggtccaggtccacgcccgccaggatttttctaggacattctataatgttttttccaattcgtagcagcggcttatcatgatgtatcgaattgcgctgtatccatttttttgataaaactgaagccctttggtattgccctcatccaccatcactttagatcttcgacaaccccgagataccgcaaagctctctgctttgagcaacaaagtttgcccgtaacgtttgcgttgttctttcggactaacggccatcatatccacatagagcagttctccatgcatgagaaaatggatgaatgccacagcagctttatctggctccgacgagacaacaaaggtcatgcccctgttcattcgcaggggtatttctttgcggattttattaatttccttttcgctcatatgggataaaggaacaagttgagtgtcaatcagcttcatgatgacgccatcatccagcttggatgtgcgttgccgaatcaccatgcggagcctcctttcaggaccagtcatgctgctcgtatatcctatgcccgaagcaagataaaaggtgactgaatgaagcgctgggattagggcaaccttataggctgaagagcgaggaaagaaggttctctgaatttttatgcaaaacaggtattgacttatcggttggaggaatcatataatgttcctaacatttaacgagaatatttcatcggctatgaagaggacgaagttttaagggctcttttgctcagagagtggctggaattgctgaaaccaccaccattatcccttatatacgagctcacctcggagctgttttcctgaaaagcactggatgtcactcctttcgcgtattagggaaaatcgtatgtctgcgttacagacaacaggtatgggaaacgactatgttcgtttgagctattcgttttgttgtacctggtaaggtccgttattgcgaaatttcgggcaaagttgggtggtaccacggaagcgataacctttcgtccctcgcaagcatgaacttgtttgcaggggatggaaggttttttttgtaactttaaatgtcagaatggtgtaaattccgagaggaggatgactaatgggagctcaaattccagaagtacgatcgacagatgaattacgtgaaaaatggatgaagccggaggtcattagcggttccgagattctgctgagaagtttgttgcttgaaggtgtggattgcgtatttggttacccgggtggcgcagtgttgtacatttacgatgcaatgtatggtttcgaggatttcaaacacgtcttaacccgtcacgaacaaggtgcaattcatgcagctgacggatatgcacgtgcaagcggcaaagttggtgtttgtatcgctacctccgggccgggagcaaccaatctggttactggaatagccacggcatatatggattctgtgccgctggttgtcattacgggaaatgttaattccagcctgatcggctcggatgctttccaggaagcggatattaccgggattacaatgccgatcaccaaacacagctatctggtaaaagatgttaaggatttgtcgagtatcattcatgaggcattccatattgccaacaccggccgtaaaggtcctgtactgatcgacattccgaaagatgtctcagccaacaaaaccttgtttgaaccgagtactgaacctgttacattaagagggtacaatccacgaacagtaccaaacaaattgcaggtagaccgtttggctcaggccattcaggaagcagaacgtccaatgattctggctggtggcggtgtggtatactcgggaggacatgaagaactgttcgagtttgttgagaagacaggcattccgattacgacaacccttctggggcttggtgcattcccaagtgggcatgaattatggacagggatgccaggaatgcacggaacatacacatccaacctggccatccaacagtcggatctgctgattaatatcggcgcacgattcgatgatcgggtaacaggtaagctggacggattcgctccacatgccaaaatcgttcatatcgatattgatccggctgagattggtaaaaacattgcaaccgatattccaatcgttggtgatgtgaagaccgtacttgaaatagccaacaaagaagttggacgtgcagagcgtgcagatgcatggagagatcagatcaaacagtggaaacaagagaagccatacagctatacggattcagacgaagtgctgaaaccgcagtgggttgttgaaatgttgaatgatacaaccaaaggtgaagcgattgtgactacggatgtgggacaacatcagatgtgggcggcacaatattacaagtttaatcaaccacgttcatgggtaacttcgggtggtctcggaacgatgggctttggattcccttctgcaattggtgctcagatggccaatccggacagacttgttatctccattaacggtgacggcggaatgcagatgtgttcccaagaactcgcaatctgtgctattaacaatataccggtaaaaattgtgatcattaacaatcaggtacttggaatggttcgccaatggcaggaactcatctatgagaaccgttacagccacattgatctggcaggaagcccggattttgtaaaactggctgaagcatatggcgtgaaaggattgcgtgcaacgaataaagaagaagcagcgcgtgcttggcaggaagctttggatacaccaggaccagtcgttgtagaattcgtagtacgcaaggatgaaaatgtgtatccaatggttccgcagggagcaacaattgatcaaatgctgatgggggatgctgacgaatgattagacatacgatttcaatattggtaaacgatcagccaggcgtccttcagcgtgtatcagggttgttcggtcgacgcggatttaacattgagagtattaccgtaggtcaatcggaagaacctggactatcccggatggttattgtcaccattggtgacgataaaacgctggagcagattgagaaacaattgtataaaatcatcgatgttattaaagtggttgatttcagcctgaaaccgatggtagcccgtgaactcgctttgattaaagtgaaagcagagccttccgagcgtcctgaaattctgggtgtggtagaaacattccgcgcatccgttgtagatgttggtccaggcagcctgattgtgcaggtagtcggagatacggacaaaattgatgctatgattgaattgctcaagccatatggcattcgcgaattgtcccgtacaggcataactgcattggtacgcggcaacgtataaagttataatgaatgaagagggacgacggttagctaacatatacagttgatcttatgtgagtgtcagtcccttaacagttgtaatgtaacattttagtgatgtaacgcttgaaaatatagctacattcccgcattaatgggcgggtgtctgaacggatcggatcagaccagatatgcttttgacactccaagcgaggcggtcccttgagacacccgctcattaatgaagggttctttacaatacaaaggaggacttataaacatgccagtaactacttattatgaacaggatgcagagcttaacgtattgaaaggaaaaacgatcgcggtaatcggttatggtagccagggccacgcccaagctcaaaaccttcgtgatagtggattgaacgtagtcatcggacttcgtgaaggtaaatccttcgacactgcaaaaaatgacggatttgaagttctgtccccggctgaagcaacaagccgcgcagatgtagttcaaatcttgctgccagatgaaactcaagcttctgtatacaaaaacgaaatcgaaccaaacctgaaagaaggcgctgcattgctcttctcacacggtttcaacgttcatttcggtcaaatcgttgctccaaaaaacagcgatgtattgctggtagctcctaagtcccctggtcacatggtacgtcgtacttatgtggaaggttttggtgtaccgggcctgatcgcgattgagcaagatgcaacgggtaaagctaaagaaatcggtttggcttatgctaaaggtatcggttgtacacgcgcaggggttatcgaaacttccttccgtgaagaaacagaaacagatctgttcggtgagcaagctgttctgtgtggtggtgtgagtgcattggtaaaagctggattcgaaacattgacagaagcgggttacgctcctgaaatggcatacttcgaatgtctgcacgaactgaagctgatcgttgacatgatgtatgaaggcggactttcaagcatgcgtgattccatcagtaacacagctgagtacggtgactatgtaactggacctcgcgttgtaactgaagatacgaagaaagcaatgaaagaagtcctgacagatatccaacaaggtaaattcgcacgcgacttcattctggaaaaccaatccggacgtgcattcttgacagcaactcgtcgtaacgaagctgaacacccaatcgaagtggttggcggacaattgcgtgagatgatgcactggatcaagaagtaagcattaacttctagagcatgcactttaaggtaatcaagtaaacttagagctttaactgggaatagcggccgtgcttatgcgtgagccgctattgctggttcagagaaacatataataacaagtacaggaggtgcgaagcgtgcgtaaaatctatgtatttgacacaacgctgcgtgatggagagcaatccccgggagtcaatctgaacactcgtgaaaaggtggaaattgcccatcagctcgagcggcttggcattgaccggatggaagcgggtttcccggcggcatctccaggtgatctggcagctgtcaatgcagtagcaaatgcggtcaaaaatgtgactgtaattggcttgtcccgttccagagagcaagacattgatgcggttaaggaagcacttaaaggtgcacaggacccgtgcattcacgttttcctggcaacttcacctattcaccgccaacataaattgcgtatggacaaagcgcaggtactggatacagctcgttccgcgattcgttatgcaaagaaaacattctcgaagatcgaattctcccttgaggatgcaggtcgtaccgagtatgatttcctcgtggaaatggtgaatatggctgttgaagaaggtgcagccgtcgtgaatattccggatacggttggttacctgagcccatatgaatacggaaacattttcaaacatctcaaggagaatgtacacggtattgaaaaggtacagctgagtgcccactgccataatgacttgggtatggcgacggccaatacacttgcagccattctcaacggagccgatcagatcgaaggtacgatcaatggcattggtgaacgtgccggaaacacggcgatcgaggaaattgctatggcgctggagacacgtcaggaatttttccaggcgaaaacatcgctgcagttgtctgagattgcacggaccagtcgtttggttagccgtttgacaggtatggttgtgcctggaaacaaagccattgttggggcaaatgccttcgcacatgaatccggcattcaccaggatggtatgctgaaggaaaaaaccacgtacgagatcatgaccccagagtccatcggtctgaaggaaagtaaacttgtactgggtaaacattctggtcgtcatgccttccgtgaacggttgattgatctgggatatgagctggaagaagaagcattgaatcgggctttcgcccagttcaaagatctggctgataagaaaaaagaagttactgacgaagatctgcttgccgtaattgaagagaaattgcaggatgcacctgaggtgtataaactggaatccatcttcgtaacgtacggagacgaatcggtaccaacggccaaagtccgcattgcaacgcttgacggggatacgcttgagaagcaagcagagggtaacggatcggtagatgcaatctacaatgcgattgaccaagtgagtggggaagacgtaacgttgtctgactattccatcaaatcggtaacgcatggtaaagatgcattgggtgaagtacatgttgtgctgactcagaatcaggtttcggtacaaggacgtggcgtaagcacagatatattgggtgcaagtgcacgcgcctatgtagacggcctgaatcaattgattgagaagcgcaagacatatacgaaccgtgtaaacgttaatctgtaggctccaatgcaagaagcacgcacctttcattgaactgaactttaagctgagacacatgtatgctgctagaatgatctatctttaatttaatggatatagaagatcgttcgacttgctttgttacgttcagtgagggacgtaaagagtctgactctcctgtagagggtcagactcttttgcttattatttatatgattatggcagtaaaacacagaaccttttctacgcttcctattgtattgccttacgctatcaagctattaccacgcgtatgcattaggtgcatgtccacctgggcccgggaaaatctcatccagacgtttgagcacagcttcatccaaagtcacgtccagacatttgagtgcggtctcaaactgctccagcgtacgcggtccgataatcggggcggtcactgccggattggctgcaacccatgccaaagccaccgtatcctgtggttcgccgagatcacgacacagtgcggcaaagtcttcaagctgagtttgctgctgctcaatccgtccagcgatgcctccgctgcgtgttccttccagcttctgcagagcgttacgtcccagtaatccaccatccagtgggctccatggaatgacgccgaggcccagctctttggctgcgggcagtacttccaactcgggcaaacgacagttgagactatatttatgttgttcggaaaccaggccgaggaaatgacgattcttggcttcactttgagcgattgcaatctgccatgcagcaaagttactcgatcctacataaccgattttaccctgatgaacggcattctcgaacgaaccccacagctcgtcccacgatatggcagggtctacatgatgcatctggtatagctcgatatgatcggtctgtaagcggcggagggaaccctccagatgtcgtctgattttgtaggcggagaggccagcttcgttgttggggccatctgtatcatcatgcatggagccatatactttggtggccagaactactttttcacgtctgcccccaccctggttgaaccagcgtccgataatttcttcggtaaggccggaattttcaccccaaccgtagatgttagcggtatcaaaaaagttcacgcctgcatcgagtgctgcgtccataatgcggaaagcttctttttcatctgtagcaggcccgaaattcatggtgccgagacagattcggctgaccttgaggcctgatttacccaaatacgaatattgcatgttgcttatccctcctgcgtacctgatttgaattcagctatattttaacccagccgggaggtcagaacaacttggaaaggccaatctctattggcttataggtaaaatctattaaagtcatagaatgtatatcttggtcaaatgaccttccttggaatatgatacaaaagagagagttaatatgagacgttacgttatgaataattaatgaatgaaatataaggagtggacaacccaatggcagacgtgaaaaaaattgcagttattgcaggtgacggaatcggccctgaagtcgtagctgaggctgagaaagttcttaaacgtacggaggaagtattcggttatcgttttgagacagagcatgcgctgtttggcggaatcgcaattgatgagaagggtacacctcttcctgaagaaacactgagcgtatgtaaaagtgcagatgcagtcctgcttggagcggttggcggtccaaaatgggataataatagcaaggagcttcgcccggaaacaggcctgctgggtattcgcaaagcacttggattgttctccaacctgcgtccagctgtcgtatttgattgcctgaaggatgcttcaactctgaagcctgaagtactggaaggtacagatctgatggtggtacgtgaattgacaggtgggatctacttcggtgagaaattcagacgtgaaagtgcacagggcgaagaggcagtagatacatgtgcatataatgtaacagaagtggagcggatcgttcgtcaggcattcgaaattgcgcaaggacgtcgcaaaaagctggcttctgtagacaaagccaacgtattggaaacttcccgtctctggcgtgaagtcgtgaaccgggtagcaccggattatccggatgttgaactggagcatgtactggtagacaactgcgcgatgcaattgctgcgtcgtccatccagcttcgatgtcatcgtaacggaaaacatgttcggagatatcttgagtgatgaagcagcgatgttgacaggttccatcggtatgctcgcatctgcatcactgggagagggcagcttcgggctctatgaaccggtacacggttccgcaccggatatcgcaggtcaagggctcgctaatccgattgcaaccattctctctttggcgttgatgttccgcacaacctttggttatacagaaggtgcggatgctattgaagcagctgtgtcggatgtattgaacgcaggacaccgcacgagtgatattgctgtagacaagagcacagcgatcagcacgaccgaaatgggcgatttgatcgtggcggctattcagaaacaagcgtaattataggaccaaaaacatggcagccctttgtttccagttatggaatgtacagagggctgttcctttatgatttttgccacgaaaaatccttatttataatgattataaaaaaataatgtttataatcttgactttgggaagtccggatgataacattttacttgtacttgttatcaaggttcaaatcattttaattacaggaaaagcgtacgcgtttttcttgatgatgagcaatccgcaaggatgcttacataatcccaaaggaggaatttttagttatggcagaacgtttggtaggtagaccagcaccggatttcgcaatggaaacagtatcgggagacggacaagacttcggttccgttaaactgtccgattatcgtggcaaatggcttgtattcttcttttatcctttggacttcacatttgtgtgcccaactgaaattacagctttgagcgttgcttccgagcaattcaaagctttggatacagaaatccttggcgtgagcgtagactccgtacacagccacaaagcatggatcaatacacctgtagacaacaatggtctgggtcaattgaacttcccactggcttccgatatcacgaagcaagtggctaaagattacggcgttctgatcgaagaagaaggcgtagcattgcgcggtctgttcatcatcgatccagaaggcgaactgaaatatcaagtggttaaccacaacgatgtaggccgtagtgttgaagaaacacttcgcgtactgcaagcactgcaatccggcggattgtgtgcaatgaactggaaaccaggcgacactaacctgtaagccagattaacttgaacggtttttgttcaagccctcatcccgttagggattgagggctttttgcacccttttgccggaagttatcacgaagttaatcaaaagtgtttgaacaagcagctaagcgtgttaataatatattagaagaaagtcttctttttatctgttgaaagaggaattgatggccttcaaggcgaatagggtatggaaacccggtaaatattccggtgctctgcatttataatctatacatgaatgtgatacactgatggaactattccttttcggaagtgctgtaagtgtacgggatggcattttaacaaaaaaagtcccggcacgtaataaggagggtgaacaaaaatgagttactgttgtggggcaagtatggttggaacgaagggcacgctgaagcattaccgcacccaggttcataatgttcccctactgttttgcccggtgtgtcaccgggttgaggtgcattataaagtggaaaacgaatacgaaatcctggctgaatatgcgcatggagacggtgcatccgagatcgactttcaagattatgttacagaagatgaggatgccattttcgaaaactgtgtaaaccgtgagagcgaggatgccatggtcattgtgcagcgccagattgatatggctctggatttgctcaggctcgcgaaggaaaccaaagacgagaagtgggaaagcgaacttaaacgtcgattagctgtgatgagtcagcgcagactgaaaattcagcataataagaccggactatagatgaactcggatatatcaccaattaaagatattaaaaacgaagctgatttgcctactgggtgaaacggcttcgtttttgtgcgttgttctggaactaattcgaggttttttttaaaataatttccattcgacactttctccgattgactctcttctataaacttgtctatgataaaaacagacttgcaaagaggcggagcaaaaaatgttcgtgtttgggaataggagaaggtcagaatggaacaaacgtatatgattttccggatcgactgttggttaccgggaatagaccagcttgagttccggacatgccatccatattttcggctcagccccccaacgaaagggcaccggtaatgaacaataaaatcggcccttcctgtttctgtgatgatatgatgtccgaatggcaagtttatcatttacgtgaaaaggaggaacctgacatgattagtgaatttcaggatacagtgcctcaaccaacggatggattcccgcctgtgcatctggataacaacaagtacgagaatgtactggaacatctggatagcggtattatgttgtttgacagtcacggtgtattgacgtttattaacgttcagatggcaaagttgttggagcttccacgaagtctgttgagcggctgcaccctgatgcaaatgctgcatcatccgcagatgagccgattcaagaaaaagaaaattttacgtatctatcgggaaactatttttcaccgtaagcgctatcatgagttgattgatgaatacggaaggcattggctggttactgtgacgtacggtgatcagatggatggcgacttcttattcagcgtcaaagatgtatctgattataaacaaattgaacagaccgcttatcaaaatgacaaacttgcgatgctggggcggatttcagcatctattgctcatgaaattcgtaatccgttgactgcaatccgtgggttcatccaattgctcagaccccatttgctgcagctcggcaaagacgagtacgctcgaatcatactgacggagattgatcgggcgaatgacatcatctacgaatttctgaattcttccaaaccgtcagctccacagaagaccgtgatatccgtcgactctttgctcaaagaggtggtcttgctgaccgaaagcgaagggttgatgaagggatgcgagatcgtactggatgaaggggatgccccgctgaatgtgtccattgatgtcaaacagattaagcaggttattttgaatatggtgaaaaacgcaatggatgccattgaggaagttggcgaagaacatacgggtctaattcgaatatctaccgccacggaaaacaagttcgtgcagatctccatcgcggataacggtcatgggatggaccataacacgcttgtacgtctgtttgatccattcttcacgaccaaggagagcggaacggggcttggactttcggtgagttaccgaatcatcaagaaccatggaggcaccatctctgtggatagcaaaaagggcgaaggcacgcggtttataattatgttacccttggtatattgagaaaagcggggagtcgaggagttggccatttgccaactcctttgttttatgttgccaataacggttatagttagtaatgaatgcgaatacataagctccataacggaaggatgagatgcagatggaaatccaaggaatggaacgaatgaatcaacaactgatggatcacgtgggaaaagtgattgtgggaaaagagcatacgatagagctggtgatgacagcgatcatagcgtcaggacatgtgctgctggaggatgtaccgggtactgggaaaacgatgcttgccaaatcggtagcctcttcattggactgcacattccaacggatacagtttacaccggacttgctgccctctgacttaacagggattcatttttttaatcaaaaagaaggggattttgaattccgacccggccccttgtttgccaatcttgtactagccgatgagattaaccgggctacaccgcgtacacaatcaagcttgctggagtgtatggaagagcgccagatcagtatcgacggttcaacgagacagctggaacggccattcatcgttatcgccacccagaatcctgtagataaccagggaacttttccactacctgaagcgcagatggatcgttttatgatgaaaattcgcatgggttatccaagcagtgaagagagtgtagaaattttgagacgtacggtagccagtctttctgttgatgatctctcggcagtgatcagtcgtgaagaacttttgaaggcgcaggatacgtataaaacagtgcaaatcaatgaagatttgctacgatatatcattcagttaaccgaagcgacaaggcaacatcctgagctttcgcttggcgtaagtccacgaggggctcaggcattactcaaggcaagtcaggcatgggctgcactgcatggcagagactttgttttgcctgatgatattaaagtactggcggaacctgtgctggcgcaccgacttgtgtttcgtaaccggatcagacaacaagagggcttggcggagcgtatcatccaggaacttctgaatcagacagaagtgcctacggagaatctcgctacaagcgggcgttaatcttatggcattattatggcttgtccttgttggaggcattgtcgttgttatacatggtgtgtggtttggacgacctgcactgcgaaaactcaggtacagcagacaattcagcaagctgcgttgttacgctggagatgaacttgagatggtggagacgatatcgaatgagaaacgagtctccgtaccgtggctcagacttgaatcgatgatgccagtgtcgtttgtatttcgttccggctcaggtatggatattagccaaggcgaaatctatcagaaccataagagtatttttacgttaaaaccgtttactcgtattacgcgcaagcatccttttacatgtactcagcgtgggatttatccattaaatacagcaacgatgacaggtggggatctctttggtgtgtggcgttccaccaaaccgattcctttgcaaatgtctatgatcgtgtatccttcattagtgaatgcagaggatcttcctgcaatttatcaggtatggcagggagaagtggaagtatcacgatggatcgttgaagatcctttcttgatcctgggtgttcggccttatggtgcaggggaccccatgaatcgtattcactggaaagcgagtgcacgtacaggtgaattacaagtctacaagcagggatggacggctgatccgcaatcctggattgtagtcaatattcaggaatctgcagatatgtggagtgttgttactcgaccggaaaagattgaacgggcacttcgttacgctgccacggctgcagtggatgccatcggtagagggttgccagcaggtttcgcccataatggttatcatgtgggtggaggccgagatacacttcggattgagccggattatggcacgccccatctggaacggttactggaagctatggctgagacagagttgaaatgtatggtgcccatggagcaattcctgaatgatgaagtacgtctgaatgaagaagcacagcaaatccgcagctatctgctgattacatcctatgtatctgccgctatggagcacgagattgcacgtctgcacgaacaaggacatcgtgtaacgattctcccggtagaggacgtgaagggtaatacaaaggcggtgagtgcatgaggaacagaccggtagcgacgaccacaggactcataacaatgcttgccgtcttgatggctggcatatacctttttccgatatttacgcttgcttcattctacgcaatggaacatttgccgtacacattattcatcctggttgttcttgtaggttggttgggacagttcattcagcataaaattccaggttttagcgagaaaagtacactcattcgtggactagcggcactcgtcataggatttctcttcgcactcgttgttgggatgagccttattctcccgttgccggatatcatcacattggtactgtgtggagtcatctcggcttatgcaggtctgaccttccagccagtctttcattcagtgttgttatggcgcttgcagattatgggtgtaatcagtgcaatcgtgcttatgattgcttcgaattcgttggaattcatgcagccaatacgaacctataccctatggatctatattgccggagtgatcagctttgccttttggctagttggacgatatatgctgcaactggatcaggcaatactcaatgacggcaagagaagattggtattaagagattttgcacgtgcgaatcatcagcggttcatgtggatgtttattgttatcgtagcgattggtgctttcccaagtctggctgcctggctgggaccgctacgtgatcgcttgctcgcatggatcaggggatggtttggtccgatttccggcgaggagccacgattaccaatggacaaccccaatcagcagttaaatataccgaatgactggagagagccgccatctgagccctcagtcttctggaacatcctcggatgggtagtgatgtgtgctgtagcaggagcaattctgtggctgcttctgaggttgggacaaaaaacgataaacagacttatggaccgattcaaggggatgttacaaccaggtgaaaagaaggcagaaccacggacggagtatatcgatgtcagtgagacgcttgatgcgccagcaaaagtccgaaagaattggtttcggaagaaagaagcgccacctgcacaggatgccgaacgtgttcggtattactatcggacttggattgaaagagccgctcatcgaggcgtggaaatacaggggacacacactccgctggaggctgcacagaccattattcagaatggtatgaaggtagaagaagatgagctgtctgcgagactgccagatacgtataatgccgtccgttatggagagaaagctcccgatcgttccgatatggttgagattgaccgaatctggagatcttatcgaagtaaataagtccggaatccctttacttttcttgtcacgttcaagtatcatgagaggaatacacaagttggtcagaaaaggagcagacattaatgaagacaaatcattgcaaaattgtagattgtacgatccgtgatggcggattggtgaataattgggactttagcgtggactttgttcaacagctatatgctggattgaatgaagccggcgttgattatatggaaattggatataagaactctccgaagttgcttaaaggtgctgaggaagcaggaccatggcgtttcctgaacgatgatttcctgcgtaaagttattcctcaaaaaggcaataccaaactgtctgcgctggttgacgtaggtcgtgtggatgaaaatgatatcttgcctcgcagtgagagcatgctggatctgatccgggttgcctgctacagcaaagatgtagacaaggcacttgcactggttcaaacattccatgatcgtggatatgaaactacacttaatattatggcactctccaatgttatggagaatgaattgctggaagcatttgaattgatcaaagaaagcgctgtggatgttgtttacattgtagactcctacggtagcttggaccataatgatgtgaaatatctggtagagaagttcaagactcacttgcctaacaaacgtcttggtgttcacacacataataatatgcaacttgcgttttctaacacattggttgcggcagaacttggcgttgaactgcttgacgcttctgtgtatggtatgggacgtgcggctggaaactgtccaaccgaattgctcgtagctcatctgaaaggaacaaaatacaatctgcgtccagtacttggtgtattggaacagttgatggttccactcagagaaaaagaagaatggggttacattctgccttacatgattacaggcgcgttggacgagcatccacgttcagcaatggcgattcgctcatcggaagacaaggataaggttgttgatttctatgataaattaacaacaccagaagtgaattttgagaagtaatatagtctgaaatacagttgtaaaataggaaaacatggactctaacttgagatccatgtttttttagttcttaatgccttgtttttctctatatttgtgaataaatattcctaggagtaactattttttagttcacgtatacaaaattaaatgttattatgtaccagatagcatgtgtatgcatgtgaattgaacgttggttaatatgttttttgtcgaatcgtgtagtaagttgttaagtttggttaatgtaatttaagataggtgatcccgggaaggaaaacacggcatgaaggttaatctgcaagatcagagaaaaataatttgggtcgctgtgggcggcttattatgtttcctcgcaagtcaatggtttcgttcttcttcaagctctgatctgatcatatcgggttacccggttttgacactcttgggtggatttgctgcggtagcggcttgtatcggcatctataatcaaagctggttgtttcggacacagaagctaacgcttcggaggacattattgacaacactctttttattgattggtctgtttgaactggttcatatcgtttcatttgcagaagagattccaaatggagccatgatggaatcggagttctccttaatgatgtcaaccatgggatctttggtatgttccgtaggtttactgctcgtgtataccttaaatgagaaagaatttgcattaccacgcaaattcttacttttaagtgggacattgggtacctttgttattttgtacatactggctattcaggaatggagcatgttgccgagtatgcttgatggggaagtgcttggtggtatcttcactcgagttcatcttatggttggattgctctatggcattattgcagttcttttgtttgtacaatggaaaaaaaccaaagatggagatttaccaaccattctatgtggcattctgtgtttcttttttggtgaatgttattttgtttcggcaactggggtgaacgatctcaatctgttattaggattgatgagtaattgtatggcatattttttcattcaaaaagggctgtatacgtccgtagtggacacacctttcctgcaacagcaggtcgcggaagccaagatgaactatattgctcatcatgatgatgtaacgggacttccaaaccgtcgtcgcctttcacagcagttgaaaaagatgatggatgatgccgtggtacaggaacagcttgttggtgtattggtcctgaatattaatcggttcaaaaccattaatgattcgcttggacagcaagcagctaaccgtgttttgcgtcaggtaggtcaacgactgaaacaattgtcccttccaggagaagaagtctttggattgggaagagatgagtttgcattaacgatgacagatttcagttcaaccgatacagcgttgcgtcggacaagatccattttgcaactttttgagaagcccgtcttggttgatggcaatgagtatcatctgacacttggaattgggatggccattttcccacatgatggggagtcaccactggagattattcagaatgccgatacggctttgcacagtgctaaggaacaaggaatggaactgaatcgttttgcccatgcgatgcagatgaaggcacaggagcgtttgcagcttgagaatgatctgcgcaaggcgttggatcgaggtcagttctacctggtctaccagccgcaggttaatctgcaaagtgggctaatcgttggcatggaagccttggtgcgttggcagcatccgcagcgaggctcggtatctccggcggactttattcctctggcagaagagagtgggctcattgtgccacttggcgaatgggtgcttcgtgaagcgtgtgcacagaacaaacagtggcaggaagccggttatcgtaaactgtgtgtttcagtgaatctgtcgatgagacaattcaggcactcccatttgttggacaatatcaatggcattctcaaagagacgggactagagcctgtatggcttgaactggagattacagagagcatgacatttgataaagaccggtcattcgaacagttgcgcaaaatcaaagaaattggtgtgcatatcagtattgatgattttggaacgggatacagctcgttgcactatctgaaggatctgccgattgatcggctcaagattgaccgttcattcgtgaatgaagtcatggaggacagcaataacgccgcgattgtatctaccatcacttcaatggcgcatcatttacaactgaaagtcacagctgagggcgtggagaacgaagatcagatggtctttcttcgcaatcaacactgtcacgaggctcagggttatttcttcagcaaaccgattaaagccgctgaatttgaaaagcagtttttgagagatgtggataagcctacaggatagggaacagcgggggcgcgagggtgctcctgcttttttttgatggatgcgtaatgaaaaaaatggaaaatatgacttgcatgctatagaggatcatggtatattattatttgtaaaatcactgttaaattcctaaggaacttaacaataaatcttcaatcatgcgggtgtagttcaatggtagaactttagccttccaagctaatagcgtgggttcgattcccatcacccgcttaatgaagtagtaccggagcccttgcgatgcaggggctttttctattaccttaaaagaaatcccgtggtaacagcgagcagaagattgttctgttttcggagtggcgagtaagtaagtattctttagtttaatgtatataccctttgcttttttacaatgatctggtacaataacggagaaattgatactacacatgaatgagaggtaaccatacgtcccatgaagtaaaacacatgaattgaaccccagttaactgcagacggttttatgacgcagtcagccagagcggctgagcaatgagggattcgtgtgtccaaattcagctatgggaaaaggtatggagcaagtaagccattaaggtttacgtgtaccctgtattttgggtttctttgttcatgccgtagcttaccttagatctgtctttgaatgcttgatccaaccctgaattgccaaaccgccggctgatgccagcggttttttttgttcagcaaaaaggatgcaggaaggatgaggcctcatgatgacattggtacgcttacatgaagtatcaaaagagtggaacggtattgaattgtttacaggattgaatttggagattaatgagggcgaacgactcgccattttgggtcgcaacggatgcggcaagacaacgttgttacgcatcattttgggtgaggagcatggtggtggacggattgaacgtcatatccctcagcaggaatggggattcatgcgccagcgctcggagattgagaccgggatgaatgtactggatgcggtccgtcgtgagagcggtcagatctatgaagtgaaacggaacttggaagaactggaacaacggttgagcatgagcactgaaacggatgaagagttgcttgcagcttatacacaagtgatggagcaatatgaacagttgaacggttatatgtgggagactgaggtagagaaagtactgactcgccttggattatccgcagagcattggaatagactctatcattccttgagtggtggacaaaaaacaaaggctcgtttggcggggctgcttgtcagcaaacccaagttcctgatcctggatgaaccgacaaatcatctggatgagggaagcatgcgttggctggaagagtggttatcctcatatgaaggtacgctgttatttgtatcacatgatcgtacgtttattgatcaggtagcaacaggagtcattgagttcagtccagatgccctgaccaaatacaagggcggatactccgactacaagatccacaaagagcgtgaattacgcgaacaggaaacgatctaccgcaggcaggaattggaacgtaaggcgctggaagaaacgattcgaaattatcaggaatggttccataaagcgcataattcggcgactgatgtggaggtgaagatcacccagagcttctacaaagctaaagccaacaaaaatatttcacgttaccatgcgaaacaaaaacagctggaacgtttggagcgggaacgggtggataaacctcgtgaagctgcaaagttgaacatggaattacagatgaatccactggctgcacgccagctgcttgcgctggaagaggtgagtttttcatatacgggagacaaaccattgctgcgcgatcttcggattgctgtggaacgtggagatcggcttgctgtacgaggtcctaatggaacgggcaagacaacactgctgaagttgatgattggtgaactggaaccttcgcaaggcaaggtcacacggcatccacagctgaaaatcggttacttttcacaggagctggaagggctccccgagaatcagacgctgctggacagcttgcttactcttccatccatgacacaaagtgcggcacgtaccattctgggatgtttcctattttccagagatgatgtattcaagcgcattggggatttgagcatgggggaaaagtgcagagtggcatttctgagactgtattttggcggagcgaatctgctggtgctggacgaaccaacgaactatctggacatcgatacccaggaagtaatggaaaatgtattaaaacaggcttcaggtgctttggtgctagtatcccatgaccggatgctgacgaagtcactcgcgaatcgtttatgcgatctggaggctggtggcacagcaactctgtttgaaggaggagtgtcggattgggagcagtccaacaaacttcgggaggtggcgctggagacccgggaatccgatgacgagcggttacgattggagatgcgcctatccgaattgctgtctcctgtaagcactgctgggaaagacagtctgacacagcccgagcattcgaatgagcgagcagtcgaggcagctgagattcgcgaaatccagcagcgcctgaaacaattgaaagataagggtgcaagcataaattagaatatggacggcttgctatttcgatctattttgcatataattatgaacgatcatcgatgattacatcgatataggtaagtgttcaaaaagatcggttttcagtaccaagaagatgggatgaagatagaaatggagtagcggagcgtaggaaactacgtgagcaactacaatgtttccgaaggaaacatacttcgtaagcatctgcttattcggctgaatgccatattcgacgctggtgatgcccctaggcatcattcgtaatcaaaagcggactttttgacaacctctagagctttaacttaaaagcaaacgtgatgatggagataagtaagcagtgcctctggacagggaggaagcgccgtagattgagagcgtttctgtagaacaaggctgccgaaattcactccgaagcggttccctgaacctgtttgtgtgcagacacagaggcaacagtaggggcaaacggttaacggtcgttattccgtacaaagtgagacagaaccagttgcaggccagaagggccacgcagcaatggatgtctaacaagggtggtaccacggtcttttcgtcccttcaggggagagaaggcctttttttgttgcaaaaacaccacaaaaagggggcaattacacatgaaagaacgtttagaggcattgaagatcgaagcgctggagcagttgtctggtgtgaatgatccgcagacgctcagtgatctgcgtgtgaagtatttggggaaaaagggtgcattaactgaaattttgcgtggtatgggtgcacttagtgcggaggaacgtccagttattggtcaagtagccaatgatgttcgggctgccattgaggaagtcatcgacagcaagcaggatcagttccagaaggaagagacggcgaagcgtctgcagtccgagaaaattgatgtgactctgccaggacgtcgtggacgtcaaggcggactgcatccactgaccaaagtggtacaggagattgaagatattttcattggtatgggataccgtgttgcggaaggtcctgaagtcgaaatggattattacaactttgaagcattgaatctgccgaagaatcacccggcgcgcgatatgcaggattctttctatgttaccgaagacttgttgatgcgtacccatacatctccggttcaagtacgtaccatgcagagcatgaagggcgaagtgcctgtcaaagtcatctgcccaggtaaagtataccgccgtgatgatgacgatgcgacacactctttccaattcaaccaggttgaaggattggtcattagcgaaaacattcgtatgagcgatctgaaaggaaccctgctgcaattcgtacgcgaaatgttcggttcccacacagaaattcgtctgcgtccaagcttcttcccgttcacagagccaagtgcggaagtggatgtaacctgtgtacaatgtggcggcagcggctgtcgcgtatgtaagcaaacaggctggcttgaaattttgggcggcggtatggttcacccgaaagtactggaaatgggtggttatgatccggagaaatacagtggtttcgcatttggtatgggcgtagaacgtatcgcgatgctgaagtatggtgtcgatgatatccgtcacttctacaatagtgatctgaccttcctgaagcaattcggacggctgtaactttaagacaagaaagattaaccatatagagcaagcgaatgaaccgggaacaccaatttatagatgaaggaagtgaacgtccatgagagtatcgacagattggctgtctgattatatttcccttgaaggtgtgacgccacaggaattggcggagaaaatcacccgtgcgggtgtcgaaattgatgtagtggagaaccgcaacaaaggcgtgaataaagttgttgtaggttatgtgaagagcaaggagaaacaccccgatgcagacaaactgaatgtatgtgtcatcgatgctggccaggaagaagatctgcagatcgtgtgtggtgcgaaaaatgtggatgcaggccaaaaagtagtcgtagcccttgttggagcgaagctccctggtggattggatatcaaaaaagccaaactgcgcggtgttgtctcccttggcatgatctgttccgccaaagagctgggcatgaacgacaaattgttgccgaaagatcagcaggaaggtattctcgttctgccggaacaaacggaggttggcacgccaatcagccaggttcttggtctcgacgatcatgtgcttgaactggacctgacaccaaaccgttccgactgtctcagcatgcgtggtgcagcttatgaagtgggtgccattctgggtcgtgaagtgaagctgccaagtcccaaagaccaactggttgaaattggtgatgcagccgcgaatcatatctctgtagagatcaaggcacaggagcaatgcattcactatgcagctcgttatgtaactggcattaagctgggtgcttccccgctgtggatgcaaaaccgtctcatggcggcaggtgttcgcccaatcaataacatcgttgatatcacgaactatgtcatgctggaatacggtcaaccgctacatgcatttgatgcggataaactggaaaagggccatattgaagtgcggatggccaacgaaggcgaaacgattgttacgctggatggacaggagcgcaagctggagccgcacatgttgctcatcacggatggcgtgaaaccagtagccatcgctggggttatgggtggcgagaattccgaggtatcggaaggcacggtgaatctgttgctggagtccgccaagttcgacggcggaaccgttcggaaaacgtcgcgccaactggggctacgttccgaagcaagcatgcgttttgagaaggaagtagacccgggtgcggtgattacagctttggatcgtgcggctgaactgattcagcgttatgctgaaggtgaagtgcaccagggaatcgtggaagctggagcagaggctgcggagaaacgtgtaattcaattgtcgctggacagactgaatcgttatctgggaaccgatctgtctttgcttgaggtaaaaaccatcttcgctcgtttgcactttgcatgtggtgatgctgatcaaggattgctggatgtggaagtgccaacacgcagaggggatattacgctcgatgtagacttgtttgaagagattgcacgcctgtacggatacgacaacattccaaccacatggattgaaggaccgacgactccaggggcatatacacgctctcaagcaatgcgtcgcaccattcgtggattgctctcaggcagtggctggcaggaaatgatcagttactcctttgtacacccggataaagcaacattgttcccggcattgacacaaggaagtaaagccgtgaaactcgcgatgcctatgagtgaggaccgcagtgtgcttcgtacgagtattttgccgcaaatgctggatgcagcggtgtataacatgaaccgtaaacaggattcactggctgtatttgaagtgggcaatgtgttcttcactgaagaagatcagttgaccaagcaaccacatgagattccggtactgggcttgctgctcaccggtaatcgtgcaagccagcagtggaatgttggagcggagaaagtagacttctttgatctgaaaggtgctcttgagcatctgttcgcctatgtggggcttgaacaacgcattcgcttggtagcaaacagccctgaaggattccatccgggacgttctgcatcggtttacctggaaggtaaggatggcggggaaggcacattgatcggtacattgggtcaattgcatccggaactgcaacagcagtatgatctgaatgatgtgtacatcgcagagattgcacttgaatcgatctacaatgaagcagacgctgacattcgttatcgtgaacttccgcgtttcccggccatggaacgtgatatcgcggttgttgtgaatgaggatgttgaagctggagatatgctgcgcgccattcgtgaatcggcgggtgaattgttacaaaacgtacaggtattcgatgtgtttactggcagtaaactgggtgaaaacaagaaaagcgtggcgatggcactggtataccggaatcgtgaacgtacactcaccgatgaggaagttactgaagttcatgctcgtgtagtggctcgtctggaagagcaattcggagcggaattgcgtaaataggacaaaagaagattttttgaacaaagattagcaggaattgtttgaagtcacatcgaatccttagcattagaggatcgatgtgacttttttgtgattacagcttagaatcaacatacagacttgaaggagggcacaactgtgactacacctgatcgtacacgcgtcaccgtagagatctacgggacttcctataaactggttggcagcagtgccgactatatgaaacaagtagctaacctggtagatgagcgtatgggcgcgatctccaagcaaaattcccgtctggatactccgcgtattgcggtactggcggctgtacatatggctgaacagtctcttcagactcaggaaatccgtaatgaactgaagatgctcactggagaacgtacagaactgagaaacgaattgaatcggttgaacgccatacaaaatgaacatcaacaagaattggaacggcgtgaccaggctcttgctgatttgcaacagctgaagattgaagcagagcaggcgttgcaaaagtccgaatcggacaaaaattcagagatagccaagttgaataagctgctggagcaagaacgcgctcaagcaacggagcgagtgcagaaattgcaggcccaagcgacagcacaactgaaggaagcagaagccaagggaacgaaacagctgaaggaaatggaagagaaagcggctaaccagcttaaaaatgcacaggcacaggctgcttcccagctcaaagaagctcagaaccgttctgtagccgaattgcagcaggcgcaggccaaagctgcggcgcaatataaagagttgcaggacaagactgcagctcaattaaaagaagccgaaagccgtgccgttgcagaacgtcaacagattgaagccaaggctgcgcagcaggtccagacagccaaggaagaagccgagtcggccattttgtccgagttggagcaggcagagagcaatctgaagaaagctcaggaagaggcagcgctgcaatataacgaacttcagcaacagatggaacttcgtcttcaacaggctgaagaaaaagccctgcaacagacacaagagctcacggatcaggcgaatcaggaacgggctgacttgcaggaacaagcggagcagaagcgcctgactgagataaatcagttgaatgcggagttcaaggcgttatccgagcagttggaactcgaatggatggaaaaagaagcagccctcgaggaacaattgcagcaagccaaggaagcagcagcgtcccaggcgaaagaagccgaagcggcggcagaggccttgttgcaagaagaacagggcaagctcaagcagcaacttgaggaacaacgtaaacaggcggaggctcgactattagatgtcgaagaacaattagaagaagtaatgacccagctcattagtgcacaggacttggttgcagagcaagaacagcagcttcagcacgagcgtggtcaattggaatcgttacgtcatgagcatggggtccgtaaacaggaacaggaagttcagactcgccgaattacggaactggagcaacaactggagcagttgaaagaggaccgttcccagttgcaggagcttctgcgtgaaacggaacaggctgcccagcaatcccgtgatctacaggaacaatggaagcagaagtataatgaaactgtggatagagaaacctctctcacagcacagctacgcaaacttcaggagcaacatgcacagcttgaacaggaagcccaaaagcttcgtgaggctgaagtgaagtcggaagaggaacagcgcagactgcaaaaagtgcttgaacaggctcatgctgcggtgcgtacattgcagaatgagatcggcacgcttacggaacgtgagcagtccttgaaggatcttgctgagcagcgattggctgagatcggagacctggagaatcagattcttgaagttgctgaacaaaatgaaacgttggagtctggtgtgcaatcccttcatgatgaattatccgtggtgaaggaagagtctcgtttcaaccatgaagaggctgtgcaataccagaaggatgcagagcttttggaagagaaacgcaatcagcttgaagtcgagctaaatgttgttcgggaagagctgaacagacttcaggataactataaacaaatccgtaatgattacagtgatgcattacaacgggaagagaattacagttccaagctggatgaattgagcaaggagaaacaagagattgtgagcgcacttgaagaagcaagacagtcttcagctaaactttccgagcgctactcggagcaagagagccggctagcccagactgaggaagaagcgttggaatggcagatcaaatacgaagaactgtcagccaaacagaccgagttggcaacccgtctggagcagttgacaagacgtgaagaagaacttcgctcaagtgttgaacaagcagagcagaacgaccaggtgtggcaacgccgtgcagatgaatgggcggctcaggaacaatcctggcaggaacgctgggctacacttgagaatgaactgacggtttggaagagagaaagtgctgcaagtagtgagttgctggagggactggagcaagaacgacagcaactggacaagttacgtgcagaagcgacccaagagaaagagatcatggaaactgaactgcttgagatgggggagcgttacgaactagcggccaatcaattacgtttgttacaggttgaacgtgaaatggagcaggagaaggcagagcagctgaacacggaatatcgtcagttgcatgatgaatatacgaaattgcagacggaatataacgaatggattgaattaattgaacaggaccaggcctagcggaatgaatgtagcagaactggctcgtgggcaacgtactctggtacaatttgttatactaaagaaggagctcccgtcgctgcgggggctccttgtcttgaatactattcttcaacgataattttggagatcatgctgctgtgtcctgaaccacagaagacagaacaggacatttcaaactcaccaactttgtccggggttatgactttggagctatttctggtatccagttgaagattcagctcaggcacaaggataccgtgatttccgttttcatttttataaacaatgttaacgggaacgccttttttaagatggtactcaggttgatcgaattcatagttacttgccttgatgaccaattcttcactggctgtaactccagcatcagcatcggatccattgctgccagattctgcggactgttttgctcctccacatgcagtgaggaccagaattaacatacaggcagcaagccatgttatgcctttcttcatcatgtgcctccttaaagcgtgatatggataaaatttgaatgattgctccagtcatcataccgcaatatgtggatgcctgtacacgctgcgtatgtcgttttcttgaaaattgtacgtgtacggcagagcgtgtgtactgcccgaatgaaataaaccccttccggcacagggccttcagaggtttaggagaatacatggggacgttagggtgaagtggagattaacttttggagcttcgtccggcatcaaaaggggtggataccgggatgaagagatcgataatcccgataaccagcgcagcgagaatggcaccgagcaggctgacttcaacatgatctacaacatattgaccaagccaaatcaccagtgcgctaacgataaatccgacaataccgcgaccaaacgggttgactcttttgccgaagataccttcaacgatccagccgagcagggcaatgacaagagcaagcaacagagcgctccaaaagccaccaacggcgaatccgggaacgatccagctgaccaccattaatacaattgcagcgatgacaaatcgcacgacatgtcccaggaaattcatggtgtttacctccttttattcggattgaactgagcagggcaactccaagggggatggagaggttgcacaatcctgacacctgtagtttgtggtgttatggttgaagttatgtgtggaaggattcgttaaatagcgtaagaaagtttctttcgttataatacagatatagtttggaaggagttgtacacttggacacgaaaattttacacacactggaatatcgcaaaattttaaatacattgcttagctttgcccagacgaccatgggaaaaaagaaagcggagcaacttgaaccaagcagtgaacttgaagaagtgaagcggttgctgcagcaaaccgatgaagccttcacatttgatcgcttgaaaggctcaccgtcgtttgggggaattgtagatattacggcttccatcaaacgtgctgaaattggaggcacacttaaccctcacgaacttttgggaatatccaatacaacctttgcagcgcggcgattgaaacgtcagattggtactttgcatgaagatgagcccatcgaatcattgttctatatcagtgatcaactgtcagagcaaaaaacgcttgaggatgcaatcaaaatctgtattgacgataatgcagaggttgccgacagtgcaagcgttacgttggcgcagattcgtcgtgagctgcgaggcggagaagcgcggattcgcgaaaaactggattccatgattcgatcctctaccgtatccaagatgcttcaggatcagctcatcaccatcagaggagaccgttttgttatcccggtgaaagctgaatatcgttcgtactttggcgggattgtgcacgatcaatccggttcgggtgcgacattgttcattgagccggaatcgattgttgcaatgaacaacaaattacgtgaaacccggattcgggaagaacgcgaaatagaaattattttgcagaaattgacggcacttgtcagtgagcagggagagtggctgttgtatgatgtcgacttgctgggatcacttgattttatctttgccaaagcacgtctggctcgtgaactgaaagcaacattgcctcgcatgaatgaccgcgggttcctgaagctcaagaaaggccgtcatccactgattccgattgaaaacgtggtaccaattgacatagagttgggcaatgattatacatccattatcgtgacaggtcccaatacgggtggtaaaacggtaacgctcaaaacaattggattgctgagcctgatggccatgtccggtttatttgttccggctgaggatggcagtcagttatgtgtatttgatgcgatctatgcagacattggggacgagcagagtatcgagcagaatctgagtactttctccagtcatatgaccaacatcattcgcattctgaaaaacatgacaccaaaaagtttggtattgcttgatgaacttggcgcagggacagatccggctgaaggttccgcactggcgatctccatgctggagcatatgcaccgaacgggatgtcgcatggttgcaaccactcactacagtgaactgaaagcatacgcatatgagcgtaaaggtgtcattaatgccagcatggaatttgacatcaacacactgagtccaacctatcgccttctggtgggtgtacctggacgaagtaatgcatttgccattgcagagcgactgggactgccgggttacattctcgactacgcccgtggcgaagtgaaggaagaggatcaacggattgaacacatgattgcttctcttgaagagaaccgtcttacggctgaacaagagcgtgagaaggcagagagcttgcgccaggatatggagaaattacgcagtcgtcatcagaccgaactggagaagctggaacagcagcgtgatcgccggattgaaaaagcagaagaagatgcacgcagcattgtggacaaagctcgcgcggaagccgagaagattatagcagatcttcgcctgttggctatggaagaaggtgcttccgtgaaggagcacaaactcattgctgcccgcaaacagctggacgaggctgaaccggagaaacgcagaaaaacggtcaagaaggcggcaacagcgccgaagactcgtgctatcggtcctggtgatgaagtgcttgtctacagtttgaatcaaaaaggccatgttgtagagatggcgggcagcaaagacgctatggtacaactggggattatgaaaatgaaagtatccctggatgacttggaactgcagcaatcggctcccgcagccaaaccaaagcaaaaaccggtaacgggtatgaagcgcacacgtgatgacaatgtgaaaagtgaattggatctgcgtggtaccaacctggaagaagccctgatggagacagaccggttcattgatgaagctttccttgccaacctgggccaagtttatattattcacggtaaaggtacaggaattttacgttccggtattcaggattacctgcgtaagcataaacatattaaaagctaccggctgggcaattacggagaaggcgggaacggtgtgaccgtcgcagaattggaatagccggtccatgaatcaatgatattctgcgaccttattcatgaaggtcgcagatggggagaggggaacggtgcgtgatagaaagcattgaccaattgctgtctcatcccttggggatggtactcggttttttctcggtagcgattatggagctgcttgtatttctggcttgcttcgaactggtgaccaagtataaatgctggacggagatcaagaagggcaatgtggccgttgcgatggctacaggaggtaagatcttcgggatctgcaacgtattgcggttctgcatacaagcgaagtcttcggtatatgaagccatgacgtggtcattcgtagggtttatccttctgctcattgcctactttttgttcgaatttctgacacccgtgttctccattgataaggagatcgaatcggataaccgagctgtcggattgatatccatgattatttcagtctcgctgtcgtttgttattggcgcgagcattatctagggggaccggtcatgaagatattgatacggattctgtttgcagcatcgatcgtgttttttgccatcggtgtcatctatgtactgaatacatgattatatgaaagagaaaggttgatcaatatggaaacaacagtatgcccttggtgtcagacggagattgtatgggatgaggaactcggtcctgaagaagagtgtccttattgtcacaatgagttaaaaggataccgtacgctcaacattaacatcgatgatgaagagaacgatgaagctgaggacgacatctatgatgtggacgatgtaacgaacgagaaacagactacggatctttcggatctgtggggggatgaagtcgaactcaaattgccggagttgcgaacgttaaccaaatacgcagacgaaggtaatgatctcattcagtatgaacaaggtgtacagaagcaacttgatcatcaagaagaagtaccagagtgcccgaattgccgggaattcatgattctcgcaggtacacaagctgcaacgcaggataacttcacaccagttgctaacgcagcttcaggtgaagggtcactattggcatcaccgtttaaagtattgacctatgtatgctcgggatgtttccaagttcaatacagtctgtctgaggaagatcgtctgcgtctgatcaagaacctgagtacgcagggataaacatttcggagattctaaccaatttcatagcaatcctgaagattcatcatgttttcctcttgcttggggcacgttaaccctaagacctacctgtacatagttcacttcaggtggatgaaggaggagcagatgaagattactttaggccgacaatccattctgcttttgggcgtgaatggattgtttgcgttagccggagcgctgtcgggaacctttttgaatgtgtttctgtggaaaagccgtccggattatgccatgttggggtggttcactctcagccagcaattggccattggactgacattctggcttgctggcaaatgggtcaaggaacacaataaaatgagtgcactacgactaggtactgcgctgtccggcatattttatatgatagtcctctgggctgggtccaaagctgtagactggatatggcctctgggtatgctactaggttgttccttggggttattctggattgcatttaatgttgtgtattttgaaataacggatcgggaaaacagggatctattcaatggctgggtcgggttacttggttcgatgacaggaattataggtccatggttctccggtctgattattactcgcatgacagacaacacaggatatcggctcatcttcacggtatcactcgttatttatgtcatagcagtagtttttagtttttttctgaaaaaaagaaaggtgagcggtacataccgctggtcggaaccttggatacagctatccaagcgggatagtccctggaggaccttaggtttgggtttattcgctcagggtgcacgtgaaggtgtctttgccttcctgattgcactgcttgtatatttggctaccgcacaggagtacaaattggggcagttctcactcatcacttctgctgtggcactagtaagttattgggcagccgggaaatggttcaaaccacagtatagatcaaaaggcatgttcattggagccctcattctgcttgttgtgcttcttcctcttctctggaaagtgacctatgggacgctgttaatcatggggattgggagtgctgttgcgatgccgttatatgtattaccgatgatatcagcgggattcgacatgatgggcacaagtggcgaaaatgtggagaaaagggttgaacttgtcgttttgagagagttatgcctgatgcttggcagactatgtgggttggccatatttattgtgacggtcttaaatgctccgtctctacgcatgttaacctggcttattattgtcctcggtgcttctccgctaattggatggatctttatgcgcaagttattgaaccgaacggaagggcaagagcccacggcttagcaggcttcccaatatataaacagggtacagcgacgggaaaagagaactttccgtgtgctgtaccctatttgtagttgtattgattcagttgttggttatacaggagatggtttacttgtacgtgtgagagagaacagatccatatcagggttttgtttgccagtaatagcatccacaattaaggaagcagcaatcatgctgtatacggttccgttacctccatatccttctacaaaatatgaatgcggataatcgggatgtgtaccgatcagggggaggccatcattcgtattaccaaacacagcgccccaggcataatcgacttcaagatcatctaaagggaaataggaacggacctcttccaggagtgtatctccccggtgttttgaacgtatttcacgttgatcctctcgaggtgtttcttcatccaaaccgcctgcgatgattcttccgtccggtgttgttcgcatatacaaatatgggcgagctgtctcccaaatcatgctgtgttcaaaccattcactaagatcagacaacggtttggtagcaatcgcgtaggtcgttttcagataggctccgcgatcctttttgatgtcctgtgtctcgtaaccggcagcaaatatgactttcttggcacggattttaccgttggcagtgtggcagactacaccatcttcatcgtattcacagtgtatcatctccgtctgaccatagattcgagcgccacgcttattggcggattcaaacaaggcatgaacaaaacgataggggttcacttccgcatctcccatggtgtacagtgcagcgggtttgctgaaggggaaatgctggcttattttgtcggcatcccacagttcagcttcaaaaccataacgcttcaaggtctgatattcttcctccaatagggccacatcatcttcactgctcgcaaaacaaagacttgttcgtgggataaaccaagggtctgtatccaggctgtctgcaatttgagcaagttgtttcatggcttcacgacaaagctcataaaaacgtacgccttttgcttcaccaaaagtgtggatacatgaggttagtgtcttgtcattggtgtattgtaaaagacctgtattggcagaactgctgccgttggcaatgtctcgcttatcaatcacaacagtgttaacaccctgttccgtgagtagtttagatgtcaatgcgccccccatgcccccaccaatgatgaggcagtcacaagagatgtcttcttgcagagcagaataattaaatgttgaattgaaagtggagggccagaaaggtgtgccatagaccagatccattagaaacatctcctttataatttaaatttgtatacttttgtgtgaccgggttaacaataattgcgcataaactttatgccgaggaggccatcgaaacatgcagaatcatactatgcaagcgctgagtcccaaggaattgaactacattgcggattctatcaccaatgaagaactgctgattaagcagtgtgcagccacagcttccatcacacataatccacaaattcaacaagctctgactcactatgttcgctcacatgaacaacatctgaacacgcttgtcaatgcactgcagcaacatcagtctcttgcaccggcgcaagtcagtaattgaagacaactctaactgtataggaggaaaacgcatgtattctcaatctttatcatctaatggcgcttttatgcaggagcaggatctgctgaagtcgattcttgcagatttaagacgaacctcgcgcgaatatacaactgcgacaacggaagcttcctgccccatgacacgtcgaatgttcacagacctgacgaacgataccctaagattacaaggggaactgttcaatctgatgcagcaaaacaacatgtattctgtctcgtccaaggcacttcgtcaggacgtggataagcaaattcagtccgcccaccagacccaacaaaagtgtcagcaattcattcaggaaaagaatacgcagaacagttcatatagccaagctcctaatgtgtctcagcatcaaccgaattacggtaacccttattacatgtaacctttgcaaaagaggtttgaagcacctaacgttacaggaccataccaccgcttgcctgaattcagggcaggcggtcttttgtctatgcatcaacgtcaaattcatgtaatataagtattaattcattttcaggaacctggatgacgctggagggaaaaccatgaaagatttgaacgatctgcaattaaaagttctggatctgctgaaggaagacgcgagaaggactcccgcactgctgtcgacgctgctgggggagtcggaagacaagatcaagaacgccgtggcacagctagaacaagaccacgtcatcgtgaaatacgcaaccgtcgtgaactggagcaaaatagatgatgaaaaagtaacggccctgattgaggtgcagatcacgccggagcgtggtcgtggttttgaagggattgccgaacgcatttatctctatccgcaagtgaagtccgtatatctcatgtccggtgcatacgatctgctcgttgaagtggaaggtggcaacctgcgtgaagtcgctaattttgtgtcggagaaactgtctccgatagactctgtactttcaaccaaaacgaattttattcttaaaaaatataagcaggacgggattatctttgaagaccatcaggaagacaaccgtctcatgatctcgccgtaaaggaagatgtgtcatgatagtgaatgaacagacaaccggaaacaacaagaatatgacgtcttatctggcacctctcgtgcaacagatacctccatccggaatccgcaaatttttcgatctggttggagacaacaaggatataatcactttgggtgtaggtgaacctgattttgttacaccttggcatatgcgtgaagcttgtgtatactcgctggaaagaggtatgaccagctacacatccaacgcaggtatgccgaagttgagagaagccatcagtgaatatctggatactcagtttgataccaaatacgatcccaaggatgagatcattgttactgtgggtggcagtgaagcgattgacttggctttgcgagcattaattgtacatggcgacgagattctcattcctgaaccttcgtacgtggcgtattcaccaatcgcttcaatcggtggcggtataccggttggtgttgaaacctacgcgaaagatcagttcaagttaacggccgaagcacttgaagctggcatcacaccgaagtcgaaagtggttattctgtgttatccgagtaatcccactggagccatcatgacgtatgaagagtggctgcctattgctgaagtgattaaaaagcatgatctgattgtgatcgcggatgaaatttacgctgaattgacgtatacgcaaaaacatgttagctttgcagctatccctgacatgaaggagcggaccattctcgtaagcggattttcgaaggcttttgcaatgacaggttggcggatcggttacatgtgtggtcatcctgagcttattgcagccatgctcaaaatccatcagtatacggtaatgtgtgcgccggccatgggtcaggttgctgcacttgaggcgttgacaaatggtttgggtgagaaagatcggatggtagaatcgtataatcagcgtagacgtttaattgtgcagggcttcagagatattggacttgattgtcatgaacctcagggagcattctatgcattcccgagcattcaaaagacgggtatgagttcagacctgtttgctgagcgattgttaacggagaataaagtggctgctgttccgggcaatgtttttggccctcagggtgaaggcttcttgcgttgttcttacgctacttctgtaacccaattaaatgaagctttggaacgaatcggaaactttgtttacaaactgcaaaaagagggttaatactaaagtagaatctttttacaaatgtgacatttttatcattggaaaaaaataactttcttttacaaaataatgtgatataatttcaatttgaaataagttttcataaatttggaaaccatttttccaaggaggggttagctttgttttgtgttgaatatgatttaccgacgaatcgtgggcactatctggcagaaggcgatcatggcgaccgatggtcggtgaaacccgataacgcatctttgcatgacatttccttggaagatgaaattcatatgcttcgtcgcaagatggaacagatcttcctcgaagagaaatcattcacatccgatattgtaattgaaatcagcagtttgctggatttaaagattaatgaatatatgaaggctaacccgattaaagcaaaataacgtttatgctggattgaaacgtttcattaaacgaattagaaagtaaagaaagggagacctgagaaggtcttcttttttttgtgtgtaaaggcagggtgatcccccgataagccaggttatttttttgcgtggaacaattgtgatatattggacataggagactaaagggggaactggaatgaagagattttgggggcttactgcaatcatttctatcgtttttctgcttgctggttgtggaggtaaagatggtttttccatattcatcattgataaccaaggaaatccatctgtaatctcagagcagttacaggccaatctgcaacagaaactgggcgaggaacccaaggtagaagtgatcaccagtgcgatgtatgatgttcagaaaattatggtagaatatgcggctggaggacatgatatcttcatattgcctgaaaccgacatgaaacaatacggaagtaatggctccaatgttccgctggatgatacttttgatcccaagaagtttgaacggggtgtatttgagggtggagtattggtagagaagggtgaaggagatggaggttcagatctcaagcaagaatcacatctttacggcattccactcgaagatatgaaaatgtttaaagatgtagaatatgctgcgagcaatttgttcgctaccattccagtgtcatcttccaatgtcgaagaatccaaaaaagtgctgaaggcgctgacagagtaaagaaaattcagaatggctatggaaggagggaagcggattgctgattacggtcacaggcggcataggtagtggtaaaacccggtttgccctcaagtacgcagccgggattagccgggagggtgtatatttatccaccggtgatcatgatcccgttattcccgaattgccatccgctcattatcgtgccattcatgccgggaacggtcagcatctgacagaggtgatcacccagattaatcgggaatccaatctgtttttggcggatcagcgaattgtaattgtagacagtctgacctcctggatggctgccggtttcagggcaacaaaggatctggatcatcagcgttcagagacacagcttttgcttgatgcattattgtcttatcaggggaagttgcttgtgattaccaatgaaatgcatggcacattgcatcctaccgaggaagaacgaatatttacagcgagaatggcttcggttaatcggatgctgcagatacatgctgaaaagatgtacatgctggtatctggtctggctatcgatcttaaaagtcagggcatgcgaaatgaagatgaacgatagcgagatgacataaacgggtgacataaagaagcctccttaaccacgaattggtggcgaggaggctttatttattaagctatcctttttatttctgctttttgctacgtctgatccaccagatgatacatccgatgacaatgatagccagaatgacatacactacaatggaatagacgtccataaagtgcaaaatgctctcccatgatgcgccaagcgcagcaccaacgcagacaagaatgacattccagatcaatgtaccaatggttgtaaagagaaggaataaaccaaatttcatattggacatgcctgcgggaatggagataagactacgaacgaggggaaccattcggcagaataatacggtccacatgccatatttgtcaaaccatgcatcgacacggtgaatatcctcttttttgatgcgcagaacatgtccccagcgttccacaattttctcaaggcgttcgacgtcaatgaatagaccaataccatacaggatcacagcaccaaggacagaaccgatagttgcagcgataataactcctggaagagtgagactggtataggtggtcatgaatccgccaaacggcaagatgatttcggatggaatcgggggaaatacgttctcaagagcaataatgagtgcaatgcctatgtagccgtattgttccatgaaatcggttatccagttttgcataatcgtctcctttacttttggtttcctttgatttgtcgtatactcggcagagcacaccaattcttatatacgtgtaaagcgatagacgggtttctgaaaaaatggcattcccgtattcattattatattaccaattggagggataacgatgggcatatatacacgaacaggtgacgaaggacagacttcggtcatcggtggacgcgtcatcaaggatgatgaccgagttgaggcttatggcacgattgatgagttgaactgttttgtaggccaggcgatcagccttattgactcggctcaaggggaatttgaagatctgcgtgaacatctgctggaagttcaacaggaactgtttgattgcgggtcggatctggcctttgtgaagataagtgagagcaaatataaggtgagagatgaaatggttacacgtctggaacaatggatcgaccagtatgatgcagagaatccaaaagtggaacggttcattattccaggtggcagtcagctgtcttctgctcttcatgtgtgccgtactgtatgtcgtcgcgcagagcgtcgcacggtaacacttggacaacatacagatattaatccgtctgtacggcggtatctaaaccgactgtctgattatttcttcgtggttgcacggacggccaacgcgagacaacaggtggcggatattgaatatgtgcggagcaaaaaagtcttccgccgcaaagaatgagccagtattattcgccgattgtctacacggtgaccgaacaagaagatggctggctgctgaagaccgtgcttcagcggcggctgctggtgtcgcgtaagcttttgtccaaaattaagctgaccgaacaaggtgtcatgttaaatggagagcgcgtgtacattagcgtcaaggtagctgcgggtgatgtcgttgaagttcggatggagcaagaggaatcggatgatattttgcctgagcttattccctttaccgttctgtatgaagatgagcacttgcttattgtcaacaaggatgcgggcatcatcgttcatccgacgcatggacattatacgggtactttggcaaatggcgttgttcattattggaaatctaagggtgagcgcttccggttcagaccgattcatcgacttgatcaggaaacgtcaggtgtgctcgcaatagccaagaacccttatgtgcatcaacatgtatctgaacagatgattgcagggacggtggataagaaatatattgcacttgtgcacggaagccctgtcccggaacagggatcagtagatggcccgattgaccgcgatcctgaagagccacaccgccgaatcgtaacacctgatggctacgctgcaagaacgttgtacacgaccgtaacacgttgggcagaaggtagcgccagtgcgataagtctcaagctggaaagtggcagaacccatcaaatcagggtacatatgacttctatcggatgcccgttgataggtgatcgaatgtacaagacactacctgtgcatgagatcgatgagcagaccatggctgttcgagaagaacgggatacctggatcgaacggcaggcattacacgcttgtgagttgacgtttgaacatcccattctaaaggaacgcataacgtttcaagctccttttccagcagatatggccgcgctagagaagcgtttgaatgatgaggcagctccaagggagatgctctaggagaaagcgccaaagcacttccctaagaaataacggctttgccgtagttttgtgcaaagcccgtcctgcttgtcagtcaacgctagttggctaacttgtgtgagggatgctttatgcacccgaacaacatgccgtaggctaatctttatggtttaatgtattgatgtttacccatttcatgttaatatttcaagaattcaaatctcaaaagcttttaaggatataaaagctgtaagattttgacccaaaaaaatagcgattgtgtgtttctggtctcattcgcaaaagtcagtaaagttgcatggcgatggtatcgatttggagcgacttttggatttgcgaagcaaaccaagggaagcgagaagtcgaaaccggagtcacacgaaaccggagcatttggaggaacagatacaatgagtaacctaaaagtatatcaatatgccaaatgcggcacatgccgcaaagctgtaaaatggcttgaagctcaaggacatgagctggagttaatccctatttttgactcaccgccttcagaatttgaactaacagaactcatccaaaagagtggactggaagtgaaaaagttctttaatacgagtggggaagtatacaaagaacaacaattaaaggacaagcttccgggcatgtccgctgatgaacagattcgtttactggctaccaatggtcgactgatcaaacgtccgatcgttacggatggagaaaaggtgacggttggattcaaggaagaaacgtatgagcaggaatggaataacgcataaacgcgctgaatatcagccttgaattgttcaaaattcagggcttttttggctgaacgatggttggcggaactatgctataatgatagaattagtttcgatattttaaatgctagatttagataggagagaacaaattcaagtgaatcaacgtaatgaacctactttgttgctggtagacggtatggcggtgttgttccgtgctttttatgcgacatctgcaagcggatatatcagacgtacaaaggcaggattgcctaccaacgcagtctacggatttatccgttatttctgggatgcggttcagacttttgggccaagtcatgtcgtatgttgttgggatatgggcggtaagacgttccgcggtgaagaatatgcagcctacaaaggcaaccgggctgaagctccggatgatctgattccccagtttgctctgattcgtgaagtcatggatagcctgggtattccgaatataggtgcacaaggattcgaagccgacgattgcatcgggacgcttgcgaagtattataccgaagagaccgatatgaatgttatggtactgacgggtgaccacgacatgttgcaactgatcaatgaccgcacaagtatcattattatgaaaaaaggccatggcaactacatggtgtacaaccctgaaacgctcatggcagagaaacaactgacacctcgtcaagtgattgatatgaagggtctgatgggagatgccagcgacaattatcccggagtacggggaattggtgagaaaacagcgttgaagcttgtacaggaatacggctccattgaagggattctgagcaacatggataaactgaccccttcggtgcgtaacaagattgagaatgatctggacatgcttcatctgtcccgcaaactggcagagattcattgtgctgttccggttgcctgtgcgctggatatctgtgaattgcgtcttgatccggatatggtgatggacaagtttgaacaacttgagatgaagagccttggctcttggatgggagtggcaatagggtgagcaacatgaagaacgtacgaacaggcaaaaagtggtggacaggggctatggccctcgtcctggccttgcccgtaattctttcgggagcagtaagtgcaccacagacagtggatgccaaagcagcaattagcaccaaagtacagaaagtaaaagcagcaggacgtaattttaccgtacagaccgtttcgattccaaagggaacaccggttaccgtgggactcgcgaagaagcaagttggccagacggcaacattgccatcgattgtgaaagcctatggtgcgcaagcagccattaacggagcattttttgaagcatataacggagcaccagatccatacggtatgttaatagcaaatggtaaggtcatacatattggaagatacggaacatccatcggatttaaggaagacggctcggcgatcatggattcacttcaggtgagtttgacaggtaaagtaacggatacaaaaggtaaatcacggagttggtatgcaacctttattaatcgaacaccttcagcgaacgcaagcattacgatgctgtatacgcctgaacgaggtgccacagtcgggttcaaaggtggcactgcggttgtcatggagaaaggtatcgtgaccaaaaaagtgcccaataccaatgtagcgattcctaagaatggctcggtactggtcttcacaggtaatcagaagtcttcttcggaccgtttcaccgttggttcgaccgtagaaatgaattataagtatacgaacgcagcaggcaaagaaatcccttggcaagatgtagtgactgctgtgggagcaggaccccgtctggtgaaagacggcaaggtagctgtcaatccgacgagcgaaggtttcaaggatgccaagattcttaatgcttccggagccagaagtggtattgcgatcatggcggacggttctgttatgctggctaccgtttccggagcaacaatcaaggagtgggcagcggtgatgcagaagcttggcgccaaacaggccatgaatctggatggcggtgcttcctcgggtatgtatgccgggggcaaaatgctgacttctccaggccggctcttgagtaatacactcgtatttggcggctctgtgcgttaaaagaaagtgattatgggaggtatgacgcaaatgacactcacatctgatcgaaagccaggggagggcaatacagctgttctggccattaatgtaggactgccgcggccgctccctgggcagaagcgtgaagtgctgagcggcattgtgaaacatcctgtatccgacgcggttttcctgtcattcactggaatgacaggggacgcgcaggcggatctggtgcatcatggcggccctgacaaagccgtttgtgtatacgattacagtcgttatccggtgctcgaacaactgatggatcgcaagctggattggggagcttgtggagaaaatctgacggttgaaggctgtgccgaagaagacgtacggattggtgatgtgtacgagttgggcgaagccacagtgcaggtcagtcagcccagacaaccttgcttcaagctgggtgcgaggtatgactataaggagctgcctgtttattttcaggagagtggatataccggcttttactttcgtgtactgcaagaaggtgaggtaaggccttcatcgatatttcgacggatcagcaccgatccagcctcaatgacggttcttgaagccaatcgaatcatgcatcaggggaaagaaaatgtcgaaggtattcaggcgttgctggccattcctgcgctgtcagacagctggaggcaaacgttaatgaaacgattgtccaagctggagaacaagtagcaggggaattatcgtgtcatcaagtaaagcaattcgaattcctttttaaactaacttgggagtgtgactaacatgacgatcttaggcgcaattgaagcaggcggaaccaaatttgtatgtggtattggcacagaaaacggagaagttctggaacgcgtaagttttccaacaacaacaccggaagagaccatggctcaagtgatttcattttttgaaggcaaaggcattgaagctctgggtgtaggttcattcggtccgattgatccgattgaaggaagcccaacatatggctatatcacaacaacaccaaaaccacattggggacagtataacgtgattggcaagctcaaggagcattttgatgtgccgatgacatttgatacggatgtgaatggtgcggcacttggagaagcaacctggggcgctgcacaaggtcttgagagctgtctgtatatcactgtgggtacaggtattggtgcaggtgctgtggttggcggtaaaatggtccatggattgtcacatccagagatgggacatatcattgtacgcagacatccggaggatacatacgagggtttctgtccgtatcatggtgactgcctcgaaggccttgcagcaggaccggccattaacaaacgttgggagcaaccagcttatgaactgcctgcagatcataaagcttgggagattgaagcacattacctggcacacgcactgatgaactatgttctgattctctctccacagaaaattgtcatgggtggcggagtaatgaagcaggagcacctgttcccgatggttcgtagcaaactgcaggagttgctggctggatacgttcagcatccggcgcttcagtccgacattgaccagtatgttgtttcaccaggacttggcgacaatgcagggctgtgtggttcgctggcgcttgccaaattggcattgaataagtagattataaagggattgacgaattttaccattgtggtatgatatgggcaacagcatagtacggttaatgaggaagcacctctcttgcatgcattttgcaggaggggtgtttttttgtgctgcctataggtagtatctctaactcgtataagctaaatattcaaagggagggaacgaaaatggaagtcattttcatgaacagattgtccagaatgtcagatcagaatgcagagtatgcacagttatggattggggaagaggaagatagttggcagctgggatggagtcgctatgaggaaggagagcgtgaggacagcatctggtatgaggggacttcttgggaggagctgcttcatatttaccgtcatcagcttgccatacagatgagtgaggggtaccgaccgcagttgcaggggttatttcatgagaatgatgatctgaagtcacgcagttatggtggacagcggctccattgttacagtgagttatacggcaatgagcagttatatacggatctgtgcacatggcgcaggaagagagctgtgtctgaccggaaggcactgtattttattgcaaccaatcgtctgctgcgtttgatcagtgcctttgttccgcaatcgctggatgaactgatgcaactgccgggcgtaggagagagcaaagcaactgagtatggtacggaatggatggagattacaaacgggttggagcgttcaacgacattcccgctggactgggtatacacggcgctgaaggaagaagagtatgagagttggttatacaagcagagagagcagaagtacaagcaggaacttgataagttcaccacacgcaagcaggtgcttgaaggcatgaaggaagggtatacgttagaggagattgttaatcgatccggattatcccgacgcgagttggttgagctgttagaggcactggatcacgaaggttatgacaccgattgtcttcttgatgtggagctggcagtgatgccagagaacgaacaagaggccgtatggagtgcgtatgaggagctgggagatacgttcctgaagccagtattacataaggtgtatggaggagagaaacccgatggaggaagtctggagcaggtctatgaaagactgcgcatgattcgaatccgcttccgtcggcacgcagagacagagaagaatgttggttaataatcagaaatgaaaaaagacgaggcgtttctcccggaggagcgcttcgtctttcttatttcatacgagttcatacccagtctttcttgcggaaaatgaagaacatgctcaggcccagtgtaaccatcaggccaatcacaacaaaatagctgtatttccagttaagctctggcatattcgtaaagttcatgccgtatataccggtaatgaccgtcagcggcatgaagaccgtggtaatggcggtaaatacacgcatgatctcattcgcccggttcgcaatactggattggtaggcttctcgcaagttgcccatcaggtcgcgataagtctcaaaggtttcagatatttttacagcattctcatagatgtcactgaaatacttttgcagttgatcatcgatgagacgcagatcttttttattcaaggtgttaataacctctttctgaggtccaaggacttttttcagccacagaatctcactgcgtagcccgatgatttcattcagatgtgactttttggtgtgcatcagaatgtcttcctcaagcttctcgatccgtgcttcaattcggtcacctacggtgaaataattatcaacaatcaagtcaaccagcaaatacagcagacgatccggtgtactgatttcctgttcccacaggattggtttaagtgtacgcaattcgctgaccttgtgcttggtaacactaataatgaaatgtctgccgagaaacaggttgaccgcacgtagaaatatctcttcatcatcaaaacggatgctattaatcacaataaaataatggttctcataaatttcaatcttcggacgttgttcttcgtcactaagacagtcttctacagccagatcatgcatcaagaacagcggctgaagtaccgccaaatcgtctacgtctgcatcaatccagtaaaatccttccgctggtggagtcagcgcctgctgaatgtcgtccaccggaataaatacaccgttgtttaccaaccggattttcatcgttaatctactccttctgcacccgccaacttggcggatattatcattatgggcgcaaaaagaacaaatcagccggtcggcagcggagcctggagatcagggctgcgttcactatataatcaaacggaagtcacgtcccgctgccggcatgctgatgtcagttctctatgcagtttgtcggaattcggctgccagtcaggcctcgggtcgccatccatttaatatgtcacctctcacataagggtttataacaccttgtttagtataccgctggtacaaggtgctttcaagcgcaaaaatgtgtctatttcgcgccctgaggcagtgtatgacaatggatgatgaacggttccgatctgggaagcagacatcgaactgcaacttgacgtgagggcattaatgtaataaagtagacggtgaaccatattcaattacaatctaatacagcgaaatcttatcaagagtaggtggagggactggcccgatgaaacccggcaaccggcggtataccgcacggtgctaattcttgcagcgactaagtgtcaggtggcactgttgtaactgagagatgagagaggcgcatatctattttacatatgacctttctcgaaatccgaggaaggtctttgtcatatgccccgacttctcagcagtgattttcgctaaggaacttgaggttgtttgtaacgttggatgaaagagcaattcaatgtttttacaagctcaaggcagtctataactgtattgatgtgaagacatcaagccgggggtggctgcatctatctatgcacaaggaggagttagacttactatgccaatcaaaatacccgatactctaccagcaaaagaagtacttgaaggagagaatatcttcgtcatggatgaaacttctgcatatcagcaggatattcgtccactccgtatcgctatattaaacctgatgcccacaaaggaaacgaccgaaacacaattgcttcgtctggtgggaaacacgcctattcaggtggatgtcgttctcgtacatcccaaatcccatacgtcgaagaatacgtctcaggagtatttggatctgttctataaaacctttgatgagattgagcaccgccgtttcgatggaatgattattacgggtgccccggtggaacaaatggatttcgaagacgtgaactattggaatgaaatccaggagatcttcgaatggactaaaaccaatgtgacttcaaccctccacatatgttgggcttcccaggcaggtttataccatcattttgacgtacccaaggttgcacttgatgaaaagtgttttggcgttttcccacataccatcaataaaccacatgttccattgttgcgtggattcgatgaagtattcaacgttccacattcccgtcatacggaagtgagacgcgaagatattgaaaagaatgagaatttagagattttggctgaatccgaggaagcggggatcttcctggttgctaccaaagacggcaaacagatttttgccacaggacatgccgagtatgacccgttctcattaaagtgggagtatgaccgggatgcagccaaagggttggatatcgcattgcctaggcattattatccgaatgacgacccttctcgtgtgccaccagctacttggcgcgctcatgccaacttattattctctaactggctcaattactatgtgtatcaagaaacaccttacgatattggcccgcaaatctaatcgagattacaggaggatgcagcaatggaagacaacaacaagttgaaaatcgaaagccgcttagcacaaattgggtccatcaatgaaccggtaacaggcgccattaactttccgatctatcaatccactgcgtttcgccacccgaagcttggacaaagcacggggtttgattatattcgtaccactaatccaacccgtaaagtgttggaagaagccgctgcagcgctggagtccggtgatgcagggtttgcctgtagctcgggaatggccgcgctgcaaacgatctttgccatgtttggtcaaggggatcatctgattgtatcgctggatctgtatggtggaacctatcgtctgctggaacgtattctgtcccgtttcggcgtaactgctagttatgtggacacgaatgaccttgcagcactggagaaggttcgtcaaccgaatacaaaagctgtatttattgagacaccaaccaatccactgatgatgatcaccgatgtgaaagccgttgcttcctgggcgaaaagttacaacctgttgaccattgttgacaacacgttgttgactccatttttccaacgtccgattgaactgggtgccgatatcatcattcatagcgctaccaaatatctgggcggacataatgatgtgctcgccggactaattattaccaaaggtgaggcgttatctgcagagatggcgttcctgcataattccattggagcggtattgtctccaagtgactcctaccagttgatgaaaggtatgaaaacgctggctcttcgcatggagcgtcatgagtacaatgcgcttaccattgccaaatacttgcttgagcatccagcggtgggtgaagtgtatcatccaggcctgtcggatcatccggggtatgaggtgcagaataaacaatccacgggtaacacaggtatcttctctttcaaagtgaaggatgcacgttatgttgaaccattgctgcgtcatatcaaactcattgcttttgccgaaagtctcggcggagttgaatcactcatgacttatccggcagtacagactcatgcggatattccgcttgaaattcgtgaagccgtaggtgtggatgaccgtctgctccggttctccgtaggcattgaacatgcagatgatctgattgcagatctcggcaatgctctgacagctgcacaacaggaagtggaaggaggagtgcactcatgagtgagtccaacaacaagcccaattccgagttgaaatttgataccaaattactccattttggcgatgagattgacaaaacgactggagcctccagtgtaccgatctaccaagcatcaacattccatcattttgatatcttcaatccgcctcaacatgattacagtcgttcgggtaatccgacacgtcaggctctggaagattacatcacattgctggagggcggcgcacgaggctttgcctattcttcggggatggctgcgatctcaagcgtgttcatgatgttctctgcaggggatcacatgattgtaacggaagacgtatatggaggtacgtatcgtttgcttacttccatattaagccgtatgcagatcgagacaacctttgtagacatgaccaatatagatgaagtaaaagcggcactcaaaccaaacaccaaggcagtttatatggaaacaccgtccaaccctacactgcgaattacggatatcgctgctgtaactgactggtcgaaggaacatgacctgatcacgattctggataacacctttatgacaccgtactatcagcgtccaattgagcttggtgtggacatcgtcgtacatagtgctacgaagtttctcggaggtcacagtgatgtacttgcagggttagctgttgctcgcacggaatcacttggcgtacaactgaaacagttgcaaaatggactcggaactgtactcggggcacaagaatcctggcttctgatgcgcgggatgaaaaccttgggggctcgtatggcccatagtgaacggagcacagccaaactggcggcatggcttaatgagcgcagtgatattacggctgtcttttatcctggactggaggatcatccgggccgtgaggcacatgagcgtcagtccacaggatatggagctgtcgtttctttcgacgtaggttcaggtgatcgcgcaaaagctgttcttaaccgggtgaagctccccattgttgctgtaagcttgggagctgtggagagtattctgtcctacccagcgatgatgtctcatgcggcaatgccggctgaggttcgccgtgaccgtggcattacagatgggttgctgcgcttctctgtaggtctggaagatatcgaagatctcattgtagatttggaacaagcacttcaggaatcctaacaaaagtggatgcccgaatacgccgatgcgtatcacttaatctcgaactaattcttttccatatgtaaaaatttttacttatttttaaagcacctgtacataaggtgctttttttcacatgtaacctgtgttacgatatgtggagtacagaaatacgatgttgccaccagaacttgcttctcttgaacaagttgggacggatcgttatataatttctcttcatgagggaggcttttttacgatgagtacggtagaccgtatcttagataaagcccttcggggcgaacgtttggacttggaagacacgattgagctatttgaatcgaatgaagtggacaaaatcggggcagctgctaatgtcattatgaaacgcatgcaccctgaaccatacagaacatttgtaattgggcgtaacgtcaactacacaaacgtgtgtgatgtgtactgccgtttttgtgctttctaccgcagacctggttcggatgaaggttatgtgcttccggacgaagttattttccagaagattcaggaaacggaagatgtgaatggaaccgagattttgatgcaaggtggaacgaatccaaacttgcctttcagctattatacagacctgttgaaagccatcaaagagcgtttcccgaacatcacgatgcactctttctccccagcggagattatgaaaatggttgaagtatccgatggccttacattggaagaagttgttcgtgccattcacgaagctggactggattccttgcctggcggtggcgctgaaattctggatgaccgcacacgtcggaaaatcagccgcttgaaaggttcatggcgggattggatggacgttatgcaaactgcacaccgcatcggtatgaacaccacggcaacgatggttatcggccttggtgaatcgatggaagagcgtgcattgcacttgctccgtgtacgtgaagctcaggacgaatgtattgcgaacaagtatgactccgaaggtttcctggcgttcattccttggactttccagccagacaataccaacctcaagctggagcgtcagactccagaagagtacttgaagactgtagccatcagccgccttgtacttgataatattaagaacattcaatcctcttgggtaacgatgggtcctgagatcggtaagaagtcgcttgaatttggctgtaatgacttcggtagcactatgattgaagagaacgttgtatctgctgctggtgcaacatataaagttaacattgaatccattctccgtttgattcgggagtccggttatatcccggcacaacgtaacacccgatacgagattgtgcgcatgttcgacgaagagaatgccgtacatgaagatttcgtaatgcagaactaattctaattaattcaatactactctttataaactttgatcgttagataagtatttatgaagccaagcccgctgactactccgtttggagatacggcgggctttttgatttctttctgcggttcgaggtcatcaaacagtacatgttacgcaattggcgatattttatattgaaattgaactgttacaatgaaagggaacttgtgtagtcagacacgctggaaggggttaaaccgatgaagagaagaatacttggcaagacgaaactggacgtacctgtattgagttttggagcatcctcactcggttctgtatttcgtgacattgaccgggacgaagggattcgcactgtacatgcggccgtagatgcggggatgaattacatagacgtttcgccttactacgggctgacaaaagcggagtccgtgttgggtgaagccatccgcagcttgccgcgaaattcatatatgttatcaaccaaagccggaaggtatggggaaaatgagtttgatttttcacgtcagcggattctggatagcgtgcaagagagcctggatcgactgcatacagactatatcgacattctgttcctgcatgatatagaatttgtgccagcaaagatcatcgtagaagaagcctttccaacgttgctgcgtctgaaagagcagggagttatacgacatgcgggcatttgtggattgcccttgccgttgttcgagaaggttctgccacagatcgatgcggatgcgatcatctcgtattgtcattattcattgaatgatacctcattattatcgttattgcccctgttggaaaaaaaagaaattggcctcgtcaatgcttcgcctctttctatgggcttgttgagtacccgaggggctcctgcctggcatccggcagacgatcgggtgaaagagctctgcctgaaggctgcccgcttctgtgcagaacaaggtagtgacattgccaagctggccgtgcaattctccacatcgaatgaacgaattccgacaacactggtgagcagtgccagccagcgcaatatcctcaataatgcagcctggatagaggaaccgttggatcagagcctgctggatgaagtgctgcgcattctggctccattgcataacgagacgtggtcaagcggacgacctgaatataatacgaagccaagcaacacgtcagcagaagcatccaagggggagcaacgatgagagccattgtatgtgaagaaatagatcaattgaagctccaggacctgcctcaaccagaacgagcagaaggagaggcgttggttgccattcggcggattgggatctgtggaacggatctgcatgcgtacaaaggcaatcagccattctttacctatcctcgtgttctgggtcatgaactggcggctgttattgaagaaatcggtccgaacgaggctgggttacagcctggggatcaggtaagtattattccgtatctgcactgtggtcactgtattgcatgtcgcagtggaaaaaccaattgttgtgcgtccatgcaagtcatgggtgtgcacgtagacggaggcatgagagaaaaaatcaacgtgcctgtctcacatctgctctcagcagagggtttgacactggatgagacggcaatggtagaaccattaagcattggagcccatgccgtcagaagagcaggaattaaacctggtgagcatgtggttgtgattggagctggacccattggattgggtgtgatggcatttgccaaacaggcgggggcgcgtgttattgccgttgatcgtaatctggacaggctggagcttagccggacttgggctggagcggatgacctggtacaggccaatgaacatgctgtacaacaagtagctgaaattacgggaggcgactatgctacagctgtcttcgatgcaacaggtaacgtgaattccatgaatggggccattcaatatgtggcgcatagtggtcaactcatttttgtaggactggtgaaagcggatattacctttcatgaccccgaatttcacaagcgggagatgagcatcctgggcagtcgaaacgcaacctgtgaagattttgaacaagtcctgtcgaccttgcgtcaaaagaaattaagcatggatgggtatatcacacaccgagtggaatttgatgagttacctactgcaatagatcaatggcttttgccagattcacatgtagtcaaagctatcgttgaactataatatcaattaattataataacagaaaaaaacgctctctgaccttggtggacaatactgtccatccataggggaagagagcgtttttttatttttccggattcgttacaatgcccgcatgtggatcaatgtgacgcacaatggacttcaaccagatcatctcaagcacatgtacctcataataaagtgcacccgggatttgcctgatccatccttccgccatcgcgagttgtgttgagtcagaagtggcttccagaattccaggttcacggcgtagccgtttgcgtacagctttttcaacttgagagctttgtgtggtcaatatgcatactttgcgtttggaagagaagcccctgaacgcaatgtacaccatttcataagcaataagataggcgattacggaatacatcgcttggtcccagccaaagacaacaccagcggctgtcagtatcaacaagttaagcagcatgattattttttcgataagcatccgttttccgctaaatacacgttcaggtgggcgggaagacggatcaccgatttccagcgtatccagtgtcccgccataccgtacgacgagcccaattccgagtccgaggcataatccgccaaacatggcggcagccagcggatgctctacaagtggcggcatgggatgaagcacaatggcaccgatcgaaaagacaaccagacctagaacagtaaccagtacaaatttcttctgcacaatcttgtaagacagaaatataaacggcacattgaataaaaataggaacaatccaatcctcatttcggtccagtgggcgaagagtgaggaaatgcctgtaatgcctccaataataatcttattggggtgtaagaacaattcaagtcccacggaggccagaattccgcccgcaataacgagaaacaggtttaaccagcggcgggtagacgatatcctggtcttggcggtgtttggcaccggattagccgatatcagaggtgctttcataggtcatcctccttagtgcggctttcgagccattctccctgggttagtcacagaaagatcggcgtaagagccgcgaagtacgttagtatgtctgttctgtacagacataggtgttatccttctttctgcagcacctttggttcttctttctttttccgaggatctttgaacttgaatattttatccaataaacggaatacatgtttggactctttggttaataaaggacccagaatggccagaattaggacatacagcgcggcaaacggttgaatcattggcaacagtcccccggctttacccatgttggccaagataatggaaaattcaccccgtgacacaatggttaatccaatattcgccgatgctttgggtgatagtcctgcactgcgcccggccagcatacccgccaggaagttaccgaacaatgtaataacaactgcaatcagagctaaccatacggcatcgccacccaaggacaacggatcaatggacaatccaaagctgaagaagaagattgctccgaagaagtcacggaacggtagaatcaagtgctcaatccgtttcgcgtgttctgtttcagcaagcaccagaccaaccagtaatgcaccaatcgcttcggcaacatgaatagtttcagagaaaccagctaccaggaacaaggctccaaatacaactagagagaatagctcattcgatcgaattttaagcaatttgtttagtagcggtgttgctttgcgtccaaggataatcacgataagcatgaatccgagggcaataagtgcagacatgatgacgcctccgatggaggatgaatcactaagcacaagtccggacaagatcgagatatatacagcgaggaatacatcttcgaacataataatacccaatatcatctctgtttccggattggccgttcgtttcaaatcgacgagtaccttggccacaatggcactggaagagatggtagttatacctgcgataataagtgcttctgcaactgggaaaccggacacaaaaccgaatattaatcccagcgtaaagttaatgccgatgtagatcgagccgccaactgcaatagagcgacccgatttaattaaacgacctaccgagaattcaagtccaaggtagaagagaaggaacaggataccgatccgacccataaattcaataaaaggctgactctcaataaaacggaagtccagatgccagattttcatggcatgtggccccacggccatcccgatcagaatataaaatggaacgaccgaaaatcttagttttgccgataaaaggccggctgctgcaataagcacaagggccagacctacttcgaatatcaaatgatccatctatttacccccttccagtcaggaggagggatttaaacagtttctgctgattgcgttcgccaacggctaccaccgtggattctgcactgataactacctccggacctgggctgatatgttttttgtgatttttctctacaacggcgataaccgttgccccagagttttgacgtacgtccaattcaccgatggatttaccgatacttccgaaggatggttcgattttgtaccactcgataatcaggtcgtcaaacgttacttcaatattttcaagctgttttggtttgtaagttaatccgccaacaatagcagcaatctgtcgtgcttcgtaatcgtcaagtgtgatcatcgagatgctttgatcgggatcatcatactcgaagtggtacatttcccggcgaccgtcatcgtgaataataatgacaattttatcaccgctgcttgtttcaatctgaaattttttgccgattcccggcaagtctgtttcgcgtacatccatggattgttgcctccttataattaggggctggccatagaagacaggcttatttcccgaaaatgattaatctgctgctcaagggaacatcaaaaaatgcgggtaaacagagccagaaattcctgacacagccatatgatttgaatttgtcggtttgggtacaacaaaaataggtactgtcataaacataggtttatctaacgtgtgctaaaagggttataagttatgcacaagcgcaccgtctttaattacagaggtgtcttcatgcaaaagcaacctgtaaatacgtcgtaacggctagtgaagagcgttcacgtattttggtgctataggggtgagggatacatacatgctggtaaacttaataggtagcagaaataatctgcgtttaaacagacaataccacggtttaaaggacagacccgttgtagggattcgcagcatcaataccaatgcgaggacaagaaagacaggcttattatgcgtaaccgcaatcagcttggacataacttgtgggtatttgcgaatgacaggtttctgctggggttcgggtatttgcaacagcacttccttgttggaagttgcttctacagacaccccaacggcagattcggtctgcatcggaatagggaagcacaaggcttggaaaacgcacaaaatgataatgatagtgtagtggagtattctaggttgttgtctcattttggcttccctcctttcccgtgaaatatactgttattaaaataataacacatttttgtcttaactccaaacctctttataatatactgagaaatcatgacacgctttccatcaatccgcttcgtatatccccatcggccttgccatatactttgaacaggaaggaaaggagtgattcttgtggaactgtttgctgtatggaccgatgtatcggggcaagaggaagcggatcaattttatcgttgtgtcaaggaaaaaaccaaaggtttacatataagtaaaagaggatttcggctcaccttcaaacataatgatggaagagcaacctgggtgtgcagagggaatgagaatcacgaagacttccagcaatggcttccccggatcagtgatctgctctcccttggactcgccgacttcattatggagacacaagaacggagcatggtggaggatatgatcgccaaggcgtgttctgtcatggatgagcatgaggtggaaaaggtcaatcgaatctgcatgccacttctattaaatggtgatctggatcagcctggacttcgggagcgccgccgtactacgttagccagtggactacggcaggacctggaggatgttcacttttttcaccttgaaggcattatcaacttccgcatacggccatataagcaggagcttcaggaattagtggagtatgcgctggatgagttctggatggatcggcagtatgaagagtttatggggttgttaaaatattttgtgttttttcaagaagccaaagtacctctggttcatcttgtacacaagggaatgcatgaatttcaggtcctggatgctggacttaatctgttacccgtgcaaaaggatgaacaggtcgttgtggaaatgccgggtctggaactggagatggatattgaagatatgattgtaagtacactcatctcgatctctcctgagaaggtcatgctccatacacgtaccccggatctgccaatcatctcgaccatatgccagatctttgaagacaaagtgcaaatatgtcatcattgcccggaatgcgaagtgctgcgctcaggattgttgacaggtcttgacgcaagtgatctcggcaattataataactgttgatccatgaatttttcatgtgaaccattgaaccaaaagcgttgacaaagacaacaaccacacgcaagatcggtgcagagagaggaaccaaggctgaaatttcctccagatatcacgtatggtttacccctttgtagctgcaattttgaaagtggagttagaatatcgcctttaatggggattatccgcgagtaaggatctgccgggtcatgcccgttatcgtcatgccaatgagggctgtatttccgaatatggatgaatcagctgaattagggtggaaccacgagtatatatcactcgtccctttgccgggacgggtgttttttgcgttcctttgcaaaatgactggaatagcaatagataatcagtccataaatatctggacacaaaggttacattaacaggaggaatgagacaaatggcagtgaacattaaattaccggatggttcggtacgtgagtacgcggatggcagcagcattgaggacgtagccgcttcaattagcagcggattgcgcaaaaatgccgtagccggcaagctggatggtatcgtggtggacttgtccacaacacttcatgagggagcattggtggagatcgtaactctggattcaccagaaggacttgaagtgatgcgtcatagtacagctcacttgatggctcaagcagtgaaacgtttatatggtaacaaagaggtacgcctcggtatcggccctgtcattgaagatggtttctactatgatatggacctcgaacatgcgctcaatcctgaagatttgcaaaagatcgagaaggaaatggaacgtattgtgaatgagaacttgccaattgtacgtaaggaagttagccgcgaggacgcgatcaaaacgttcgaagaagtgggcgatccttacaaacttgagctgattcgtgatttgccagcggacagcgtgattacgatttatgagcaaggtgaattcttcgacttgtgtcgtggccctcacgtaccatcaactagcaaaatcaaagtgttcaaactgatgaatgtcgcgggtgcttactggcgtggagatagcaaaaacaaaatgcttcaacgtatctatggtacggcttttgtgaaaaaagcacagctggacgagcatttgcacttcctcgaagaagctaaaaaacgggatcaccgtaagttgggtaaagagctggaaatgttcacattctcccaactggtcggtcaaggcttgccaatctggttgcctaacggtgcgaagctgcgccgtactctggagcgttatattgtggatctggaagaaagcctgggataccagcatgtatacacaccagttctgggtaacgtggaattgtacaaaacatctggacactgggagcactaccaggaagatatgttcccgaaaatggtaatggataacgaggaacttgttctccgtccaatgaactgtcctcaccatatgatggtgtacaagtccagcatgcacagctaccgtgatctgccaatccgtattgcagagcttggtatgatgcaccgttatgaaatgtcgggggcattaacaggtctgcatcgtgtacgtgcaatgacactgaacgactcacacatttttgcacggccggatcagatcaaagaagagttcgctcgtgttatcgagttgattcaaacagtctataaggatttcggtattaacgaataccgtttccgtctgtcctatcgtgatccgcaggataccgagaaatacttccagaacgacgagatgtgggagatgtcccaacgcatgctgcgtgaagttgtggaagaacttgaccttccattctatgaagctgaaggtgaagcggcgttctacggtccgaagctggatgttcagatcaaaacagctctgggcaaagaagagacattgtctacggttcaactggacttcctgttgcctgagcgctttgaacttgaatatgtgggagatgacggacagaaacatcgtccggtcgttattcaccgcggtgtaattagtacaatggaacgtttcacagcattcttgctggagaactttgcaggagctttcccattgtggttgtctccggtacaggcaaaagtgatcccggtatccggaaacttcgacgattatgcgcgtgaagtggaagcgaagctgaaacgtgcgggaatctctgctgaagccgatctgcggaacgagaagcttggatataaaatccgtgaggcgcagctggagaaaatgccttatatgtttgttgttggtgagaatgagcgtaatgcagaagcggtatccgtgcgtaagcgtggagaaggtgatctgggcatgaaaccggtcgatgaaattatcgctcaattgaaagaagaaattgcaacacgtttggtataaatgatttatcagataaccagtgcataatttgcgctgatcactctgcataacgcctgaatgacatgggattgacctatgttattcaggcgttttttcgtagtgtttgcagtaaaaagtatagattaattgctttttggaaaacctttgcagtgagggggaggttatacaatgaaaaagcaattctcaattcaaaaggaacatatacggggtttattggttggctgtgtaatattcgccgggatgatgatcaacctgaatcaggcggatgcctatacatttgaagaggaaagtacagtactgcatgtcgagagtcagagcagcggcattgaaggtccaattattgagatttcgagcaagcctgatcaagaatttccggaacaggttagccatcaatacagcgatgaagcccagctgacgaccatggtgtatatggctttattgtggtcaccacaaccaatggtcattccaagacctgagtttcctgagaaacaagtggcagatccgtctatgcctgtgcttgctccgcgttcagaacaaatcctgggtacacaaaaggttacagcaacgggatatacggcaggtgtggagtctacaggaaaaggaccaaaacacccgcaatacggaattacgtattctggtgtaaaagtacgtcgtgataaagaaacagtttccacgattgcagctgatccaaaattattcccgatgggttccattctgtacattccaggctatggttacggaattgttgcagatacgggttcagcgatcaaaggtaataaaatcgatctgtatttcccgacaaccaagcaagtgtacaaagagtggggcaaaaaagatgtggaggtacaggtgatcaggcaaggcgctggaaagtgtacagaaaagatgctcagcgagttggctgatgcaatcgacgtgtacaaatccgtaccggattcgtggttggacaaggccatttaatttcacatggtcacatgaataactgaagtgctctctccacataatactgactggggacgaaccccgcggtgcagcaatgcatcgtaaatatgaagagagaggtgattcgttgtggctaaaaaatcacaagggtaccaaacgccaaacgagaagtacaatgcagagtttggagaagagaatgcagcagcaaaagtgaagcaatccgctcaaaacaaagtacaagataatttccaaacacctgatgaaaaatacaatgccgagttcggtgtagaaaacacaggccaaactggccaaggtcaaggcaaagcatcaaaatacaaaaaataattgaagattcattaatcaaatgatgattcagcaccctggagcagcagctccggggtgttttacatatgcgaagttttttacattaatatcctcccatctcagtctcgagaccgagatgaattccacctgccgccgctgttctcattgtcttgtctgagttacactgattacataatacagacaaaggagacatgagcgatgaaacgatcgacgcgtgaccgctggtgggttggcatacctcttattgctattggtgcgatgatcttgttcagacaattgggatatgacattgatgtaggatatattttcagaacatattggccgttatttctaatctggtggggggtcaaaggaatatccgagattcgtcgcaacgggggttacgcctttattggaccggtaattgtactggcgatcggtggttactttcttgcccgtaacctgggatggattgattactccatgggggagttcattcgttatctgataccggttatgctgattggcggaggattgtttgtactgatcgggccacgacgtcgtgatcggaaacatcatgacaagatgcagccacctccagcacctgagcaaccttataaaccgttggctccggaggatctggagatgccatcgtcgtttgacgaacagttcgagaaaacatttggcaaaccaaaacaggaacagaagaacgatgcgcatggccctcatttcacaggatcaacggattcatcatcacaagggcatcaatataagaagaaacatcaatcgtataactctaacgataccggatatggagaacattatgatgatggctacggaaatggttatggggattatggcagtggcaataccattaataaatcggcgttcatcggtgatctgtacatggggcaggaagttttctcgttgaaaccaatgaacatctcggcttttatcggagataccgtaattgatttgaccaaagcacagattccatacggtgagacgaagattgtcatttcttcatttattggggatgtgaaagtatttgttccagaagatatggatctgggtgtgacggtgacgacaaattccttcattggagatatgtcactgttgaaccagaaacgcggcggattcctgagtagtgcccaggctgaaactgcccattaccatgaagctagcaaaaaagtacggattattgtaagtgtgtttatcggagacgtcaaagtgaataaggtgggttaatgcatgattcgaacaattctcaaggccaataaatgggaactgatgatgtattttgcgctaactggtctgattacgctgggcggattctatctattgtatggagaggtgttgatgggggctggtcgtcagcgggcatggacctatgttgctgttgttgtgctggccaccgttatcaccggatatatcgctgcattacggctccaacgcaagatcgacctgcttgatctcaacatgttgaaagtgtccaagggtaatctggcagtgcgcatgcctgaagcggatgacgcttcgtttggtcgtgtctatcaggagttcaatgtcatgatggattcgattgagaaaaagatgagactgcttcagcgcctcggtgagcaggaagtcattgagaaggagcaagcctcggagcgggctgtgcttgaagagcgcaaacgaatggcaagggacctccatgacacggttagccagcagctgtttgccatgcatatgtcggcttcgtctttaccgcgactgctggagatgaatccggaacatggtggtaaagtactggaccagttgatccagatgtcacatattgcacagcgtcagatgcgaggattgattgcccaacttcgaccggtggagctggaagggcgtgacctcaccgcagcactggatagttggtttcctgattattgcaggcagaatggtcttaaaggtgtgaaagagctggaactggatggcggaatctcggatgccattgagcaccagctgtttcttgttattcaggaggcggttgccaatgtcgtgaagcatgcagaggctggagtggttagtctgtccatacgggagagtgaacatcagatcagcatgagcatcagcgatgatggtcagggatttttacagcaagcggagcgtccgggttcatacgggttatctaccatgcgtgaacgggcggagaagcttggggggcaagttcagattatatcgaaaccgggagcgggaacgacggtacgggtattgatcccgaaattcccgaacgttcctgagtgaaccagagggggagacgcaatgagtggtaaagtaaacgtgatgattgtggatgaccatgatatggtgcgcatgggcttgaaaacatatctgatgctggaacctacttttcatgtgatgggagaagcgggccatgggcaggatgcgcttgatcagttacgtaagttaaatgatagtgaaatgccggacctgattctaatggatctgatgatgcctgtaatgaatggcgctgaagcaacaaaagccatcatgactgaatttccagggatgaaaattgtgatgctcaccagtttcctggaggatgatctggttgtgcaagcgattgaagcgggtgcggtaagttatgtactgaagacagtctctgctgaagaactgatctatgctctgcaaggggcctatagaggcatgcctgttatgacaggtgatgtgtcgcaggcgttaacccggggaatcagacaacgtacagcgagagagagtgaatcgggactgactgaacgggagaaggaagtgctgctgcttattgcagagggaaagaccaacaaagatatcggagaagaattacatatcagtatcaaaaccgtcaaaacacatgtaagtaacctgctgatgaaatgtgagatggacgatcgtacacagttggccatctatgcgcatcgtcagggatgggtgaaaacgaaagggtaaaatgctgtcgtgacggggaaaagagtctattcttatgtgcttttatctcctttttaattgtttttaaggtacggttaaggtttaaagtacaaaataaggacagttaaagaatatctcttgggaataagagattgggaggtagagaggcatggacgaacgcaactatagatcgaaccgtcaagacgaggaaaacgaaaccaaacaaacggagaatcgcaattcttccggaacggacgaatcctcctattattattcttatggaccttttcagtccgtgaatcaggaagatacagcaaatcacatgggaagcaataatcaacgtgaagaaggaaatgtagagattacaaaacctgatccggtgagacccgtacctacttactataatagtgaatcatctgaacaagcgaaaagatcatcagcaggcggtggaaacggctcaggtaacggtggagatcaagggaatggcggcaaaggcaactggaactataataaccgcaagccacgttcttccgtaagatcacttctattttcctttattgccgggatgctggtcatcaccgttctcatgtacacagctgatagaacaaacatgttcacaccggagacggcacttacgaacacagacaatcaaagttcaggacaggaagcgtctacaaacacaggcggaggcaacaatgtcacagcgtcgttactgccaacaggcaaagaagatgtgtcttccgtagtaacaagtacaagtccggctgtcgtcaaaatcgaaacactcgcgaagcagtcctcacgtacaggattgggtcagggtggatcaaatacaagtgatccgctgtaccaatacttctttggtaatggcggcggaacggaaggcaatcaaggccaaagccagcaaccacaaagcggtaatcagcttgtacctatgggcattggttccgggttcatttttgacaaagaaggatatatcctgacgaatcaacacgttgttcagggtgcagatgtaatccaggtaacgctggagaacaacagcaaaccttatgaagctaaattgctgggaagcagctttgatctggatttggctgtattgaaaattgagaaaaacagtggtgacgatgcgttccctgtagctccactgggcgattccaacagtactcaagtcggtgaatggcttgtagctattggtaaccctgaaggatttgaacacaccgttacagcaggtgtactgagtgccaaagaacgtacgatcagcattccagatgaagaaacaggaaaaacacgtgagtacagccatttgctgcaaacagatgcttcgattaatccgggtaactccggtggtccgttgcttaacctgaatggggaagttatcggaatgaacgttgcagtaagtgcagatgcacagggaattggttttgcaatcccgtcgagcgtcatctctgaagctgttaaatatcttaaagagaacaaagaagttcccaaagagccagtaccctttatcggtgcgtctctgatggctctcacgcctgaagttgctaaacaaatgggaacagacgttaccgaaggttcagttgtagccagcacgatcttccaatcaccggcttaccaagcagatcttcgtgcatatgacatcatcacaggtgccaatggtacgccgtacgcgacaagtcaagatctgattgatttcatcaagaaacagaaaatcggcagtgaagtgacattaaacgtggtgcgtgacggtaagaaaatggatctgaaaatcaaaatcggcaataaaaatgattttgatacttcacaaacaacagatacacaacagcagcaaccataaatataaggtgaggattaacacaacggaagggtttgaaggcccttccgtttttttgccctgatgaagcagggttacaatggaccaggacggattggagacgcctacttgaagatgcagattgtgcttctgcctgttacaatgggataaaacgttaggataaaggagaaagaccaccatgcgctcaactattttgattgtggatgatgacgaaaaaattgtatccatgctccgccgggggctggcttttgaaggatatgaggtacagacggcttccaatggagccgaaggcctcagcaaactgatggacaaggagccggacatcgttgtgctggatgtgatgatgccgcagattgacggatttgaggtatgtcgcagattgagagaagcaggcagcaaagtgcctgtgctgatgctgacggccaaggatgaagtacagagccgggtgaccggactggacacaggagccgatgactaccttgtaaaaccttttgcgctggaagaattattggcacgtgtccgggcattgctgcgccgcaagtcagatagtgcgggtacaccagacaatcgtctgatgtatgaagatatcattctggacaatgactcacgcgaagtagtgcgagatgggcaacgcctggaactgactgccaaggagttcgaactgttgaatttgtttatgcaaaatccgagacgggtactgtcacgcgatctgattatggataaaatctggggttatgattacagcggtgagtctaacgtgcttgaagtatacattgccatgctcagacagaagactgaagaatacggtggcaaacgtctaatccagaccatccggggagccggttatattctgagaggtgactcctgacatgtccattcggttaagactaaccgcatggtattctggtattctggccgccgtgcttattttttggggcgttgtcatctatgcctttgtttattttaattcctatcaggaagtcgaacagcaattaaaggtgaaaagtgcccggattacggatcaaattggtgtaaatcctctttcgcagtcgttggatctggacccatttacagagagccagcttcaggaggcacaaatttacattcaactctgggattatcagagtcgctcaggcataatttccggcaatatgaaaaaactggagattcagtttccggtattaaaagccaatgaaattcttgaaaagcgaggcatatccaagatatatgtggatggtacaccgtttctggtgaatcagcttcccctttctcttcagggaaccaatgaagtacgtgggattcttcaggttggtgcgaatgtaagttcacaggagcgcttgctggaagcgttgcttaatattttggtttttggctggctggtagcgatggcattggctattacctcaggtctcgtcttggctcgcaagtcgatgcgtccactcgtgactgtcattgatgccgccaatcagattcaatctggagatgacttaagtgtacgtattcaatatgctgggccgaaggatgagatcggacgtctgattgaaacggtgaataatatgcttgaacgtacagaattgtcattccgtggtttggaggagacgaatgctgcccagcgccgctttgtatccgatgcatcacatgaactgcgtacgccgctgaccaccattcgcgggaacgtggacttcttgaagaagctgtgggatcaggaaggaagcgaccgaccgaatctggatgaggagactgtcaaacaaatgtcgctggaagccattgaagatatggcggacgagggaaaacgtatgagcaggctgatcagcgacatgttatcgctggcgagagcggatacgggtcagaaaattgaactgaatccgatcccgctgcagatactcgtacaggaagtagcacgcagagcacaatttctggatcgtcaggcagactggcttccaggagatttttccaccctgaacggcatttatgtgaacggtagcaaggactatctgcaacagatgttgtttattttcatcgaaaatgcgtttaaatacacacctgaaggctctgtgacgctggatgccgtattatacaagggccaggtgggactacgcattagcgacaccggtattgggatggatcgggacgaagtgccgttcatctttgatcgtttctatcgggcagatgaatcccgcggggctacaccgggcatcggtctgggactttcgattgcgaagtggattattgaggaacaccatggatcggttgaggttgtgaccagacgtggagaaggaaccacctttattatctggttgccggttgtctttgctccgcctatcgaataaaggtataatagacaggactgcaattacatcggcaacgttgccgagaaagaaagcgggtggcaaccaagtggaagtactacgaatttcgccgcggggatattgttacggcgttgtggatgcgatggtgctcgcgcgtcaagcggcacgcaatctggatttaccacgacctatttatatattgggtatgattgtgcataaccaacatgtgacggattcctttgaagatgaaggtattattacattggatggtccgaaccggatggatattttgagccaagtggagagtggcacaattattttcacagctcatggtgtatctcctgaagtgcgcaagttggcacgggacaaaggattgacaacagtggatgcaacatgccctgatgtgaccaagacacatgatctcattcgcgaaaagacagcagaaggttatcagatcatctatattggtaaaaggaatcaccctgaaccagaaggtgccgttggtgttgcaccagatctcgttcatctgatcgagaaggaagaagagatcgaagagctgaacgtatctccaggcaaaatccttattacaaatcagacaacgatgagccagtgggatatcaaacacattatgagccgtctgctggagaagtttccgggcgcagagattcataatgagatttgccttgcaactcaggttcgtcaggaagctgtagcggaacaggcaggtcaatcggacctggttatcgtggtgggtgatcctcgcagcaataactctaaccgtctggcacaagtgtcggaggagattgcgggtgttacggcctaccgtgtatctgatgtttccgagattcagcaagattggttgaaaggtgtaaataaggtggcggttacttcgggtgcatcaacaccaacaccgatcacgaaagaagtcatcctttacctggaacagtatgaacatgacaagccggagacgtgggagatcaaacgtaccgtgaacatgagcaaactgttgcctccagttagagaaaaaacacgtacaccttagggcaaaggaaatgtaaaagtaagtctgaattaaaaacgagatgtgattgagaagaatcctgttatgcagatccgaatgtcggagcctgcggagcaggattctttttgtatatggataaggaatgtgtaccttgacgcaatcagataactatggtatattcactttaacggataaaagcttaaaagcgaacaagcgtttaagtgcgacagagtttttatatttaatcagacgcacgttaaggaaattattgtgctctcatacaaggaaggatgggaattaatatgatcgttattgcaggcaaagctacaccggaggaacagattcaggatatcgttgcagttattgaaaaagaagggcttcaggtgcatatctctcgcggagaggatcgtactatcattggtttgattggtaaagttgaacctaaaatgcaagagcatcttcgccaaatgaaaggtgtcgagaatgtcgttaaaatctcgaagtcttacaaattggcaagtcgcgacttccatccggaagatacggtgatctccatcaaaggtgtagatatcggcggaaaagaacttgttgtcatgggcggaccatgtgcggttgaatccgctgcacagattgatgagattgccgggcttgtgaaagctgctggtgggcaagtgttacgtggtggtgcatttaagcctcgtacgggtccttacagcttccagggaacgggtgtagaaggattgatcatgatggcggaagcaggcaagaaacatgatctgctgaccattacagaagtcatgacacctgagtatgtggatatttgcgccgagtacgcagatattctgcaagtaggtacacgtaacatgcagaactttgacctgctccgcaaattgggtgagtgtgggaaacccgtattgttgaaacgtggtttcagcgcgacatacgacgaattgttgaatgcggctgaatacattcttgcgggtggtaacccaaatgttatgctgtgtgaacgtggtattcgtacgtttgaatcctacacacggaatacgttggatctgtcagcgatccctgttctgcagtctctgagccatttgccggttatttccgatccgagccatggtactggacgacgtgaactggtggaaccgatgacaaaagcttctgttgctgcaggtgccaatggcctgatcattgaaatgcataccgatccggataactccatgacaggagatggtgtgcagtctttgttccctgaccaattcgccaacctgctgcaggatctggagaaattggcaccaatcgtgggtaaatcattcagcacagccaaacaaccggcagaatttttcccggcacgtgtaggcgtgtaataagaatttcatagtcaaggtctggatcatcatccgggcatctcctttgatctcgttcattgcaacgaaatcagatagatgctcggttttttgcatattttgcagttttgaacgtatttattaatcaatagtgataagaaacatttatgatgtgaagtttttcccatgatttaggttaaaatagaggacgctttaccgcattaaaccagttaaatgtatataaaactagttgttatatgaatttatgttatttataaagtgtgagtatatctaacatcccttcaaaaaataccttacataagtattgacgatgtcatgttttaaaatttataatgacgacagaaaaaaattcgaatttagacattttcttagtggggttgtttaatgttcggaatatttgggaggacgaatacatgtcggttgaaaacgtattgaaatcaattcaagagaacaacatcgagtgggtagattttcgttttgtagatttagctggtcgtgcacatcacatctcgttgccagcttcggctgttgatgcagacacgttcgtaaatggagtagcttttgacggttcttctatccaaggtttccgcggaattgaagagtccgatatggttatgatgccagaccctgaagcgacttatgtcgatccgttcactgcacaccctacattgaatgttatgtgtgatatcttcactccggatggcgagcgttatgagcgtgacccacgcagcatcgctgttaaagcagaagctttcctgcaagaaagcggcgtaggtacaacagcattcttcgcacctgaatccgagttcttcatcttcgacgatgttcgttatgagagcggcacgaacagctcttcctacttcgtagattcagaagaagcttcatggaacactaaccgtcaggaagaaggcggaaacttgggcttcaaagttcgtactaaaggcggatatgttccagtagcaccagtggatacacaacaagatattcgtagcgaaatgtgtcgccttttggaagaagctggcctgtcaatcgagcgtcatcaccatgaagtggcgacagcgggtcaagccgaaatcaacttccgttttgatacactgaagaaaacagcagataacctgcttgcatacaaatacatcgtgcacaacactgcacgtcaatatggcaaagtagcaacattcatgccaaaaccattgttcggtgataatggtagcggaatgcacgttcaccaatccatctttgatggcgattccccattgttctatgacaaagcgggatatgctaacctgagtgaaatggctctgcactacatcggaggtatcctgtaccatgctccggcactgatcgctttgactaaccctagtacgaactcgttcaaacgtctcgtacctggttacgaagcaccagtaaacctggtttactccaaaggtaaccgttccgcagcagttcggattccggttgcagctgtgacaccgaagggttgtcgtatcgagttccgtacaccagactccacagctaacccttacctggcattctccgcaatgctgatggcgggtctggacggaatcaaacgtaaaatcaatccaactgagcttggatatggtccgctcgacaaaaacatctatgacctgtctgatgcagacaaagaaaacatccgcagtgtgccagcttccctggaagaagcacttgatgcattggcagctgacaacgagttcttgactgaaggcggcgtattcacgaaagacttccttgataattacatcaacctcaaacgtgatgaagcgaaagcagtagcgatccgcattcatccgcacgagtacagcctctacttcgactgctaatcggtcggggtcggaacagttcttgttccaacttaaagcctccgggacacgctctcggaggcttttccttgaattaaacaatgtagtgctttaactttgcagggtgataaaggaatttgatgacctgaattcaacacttcagtgcatattacccttgaagcagatagagaatactgatatcatagcgataatattcactttgagtgcattttgcacaaatccatagagcgactttcaataagtaagatatagatcaaaatgtttcaatttgtctatatcttatacccgtgagcgattctaatcgaattgtgcaaaatgctgtttgtatgtcagagttacggatggaaagggcgggggattttgtgacaaaaagagcgtataactttaatgcaggacctgcggcgttaccacttgaggtactggagcgtgcacaggcggaatttgtagattttcgtaatacaggcatgtcgattatggagatgtctcaccgtggagcggtgtatgagtctgtacataatgaagctcaggagcggttgttgtcgcttctaggcaatccaaaaggatacaaggttctctttctgcagggcggtgcaagcactcagttcgcgatgttgccaatgaacctgctcggtgcagggcagactgcaagttacgtgatgactggcagctgggcgaagaaggctctgtctgaggcgaagttgatcggcgagacacatgttgctgcatcttcagaagcagagaaatttatgaaattgccggatgtttcgaatctgagtttgccagaacgtacggcttatgtgcatctgacttcgaacgaaacgattgaaggtacgcaattcaagtcgttcccggataccggttcagtacctctgattgcggacatgtcgagtgatattttctgtaaaccatttgatcttaatcagttcggcatgatctacgcgggtgcacagaagaacctgggtccatccggaattacggttgtaattgctcgtgaggaactggtgagcgaatcgcctaaaacgattccaaccatgcttcgttacagcacacatgtagataacaattccctgtacaatacgccaccatccttctcagtatatatggtgaatgaagtattgaaatggattgaagaacagggcggactggctggtattgagcaaaaaaatacgaaaaaagcggaattgctctataacacaattgatggttccggtgatttctaccgtggttgtgtggaacaagaagatcgttccctcatgaatgtaaccttccgtcttgcttctgaagaattggagaaaaagttcatcaaggcttcggaggaagaaggatttgtaggtttgaaaggacatcgcagtgtgggtggtctccgtgcctccatttataatgctgctccttatgaaagtgttaaggcactgacagacttcatgagccacttccagaagacaaatggataattaagtatagggagccttccacattgacgtgtggagggcttttctttaagattagagggttgtcgtcaacatgaaatgaaaaggagattgaacacatatggctttacacatcgttctggttgaaccagaaattccggcgaacacaggcaatatttcgcgtacttgtgcggcaaccggtacccatctgcatctcgtacgtccacttggatttcgaacagatgatgctacattgaaacgtgcagggctggattactggcatgctgtccatattgaataccacgactcatttgctgaggttcaggaaaaatatccggaaggtcgtttcttctatgcaactacgaaggccaagaaccgatatagtgattttaattttcaggatggggatttcctcgtttttggtaaagagactaaaggcctgccacctgaattaattgctgcgaatcccgatacatgcatgaaaatgccaatgactggtgacgttagatcattaaatctgtccaattcggcagcaattattgtatatgaagcgttacgtcagctcaatttcccggggttagaaggataaattttggttataaatgacggctagaattcggaaaaaaaacatttttcaaaaaaaaggacaaaaaatgtttatttccagcaggattcgacaaaatcttggcgaatctataaacatagtacaaatgtacctagaaatttagagtaagataggagaggtgtgccgtagctatgaagccagctggagtagttcgcaaagttgaccaattaggtaggatcgtattgcctaaatctttgcgtaaaaggtatcaaatgaatgagggagatcctgtagaaatcttagtacaaggggaccatattatcttggagagatatcgtccaaaatgtattttctgcggatccatcgaggaagtcaacgagttcaaagagcgttacatatgcgcacaatgtttagatgaaatgactcagcttccacaacacggataagaaataacgtcatggggtccattgaccccgtggcgttttttttgttttattctcaattggatggcataattgcaaattgaaaaaaaagataaaataagtagactaacgctgggtgtaaaggggtaaaacctcattccagacggcattcaggatgccttgcatattttcttcctcactattaatacatatgacagcttcctttgagggaattacgatacacaactgaccataggcgccatcggcgcggtaagcatcatgggaacacatccagaactgatacccgtaaccttttccccaatcaccgtctccagtcgtttcgatctgctgggacgtagcctgtcgaatccaatccgcaggtacaagctgtctgccttcccaaaagccctcctgcaacagtaactgtccaaatcgactcagttcctcattgcttatccaaagacctgcacagccaagcgttacgccgagtggagaggtttcccactctacatcatggatgccaagtggatcaaataaccgtggagtcaggtaatctttcacggtttggccggtagcagcctgtagcatggctgagatcataaatgtatccccactgctatatgtaaattgttctccaggtacccggtccataggcagagacatataatatttcgcccagtccttttcggtcaatgaagctcgctcatcagcccaaagagggggagagtcatgacccgaagtcattcggagaagatcacgcagtctcaattcttgcggcgatgggagattgcgctgtgcggcgggtacatgatcatgatcataagagaaataatcaccaagtgtcgcatcgagatgtatcagaccttcttcaagcgcaagaccaacggccatacacgtgaaggatttactgatggaatgttgtactctgcgctgatccttatcccggtcccaatgggcaagcagatgccctttttgtaatatgcgaatggaaaaaacgttcaattgttgctccgtaatcgtatgaatgaaacctttgagttgttcagacatattaacctccctaatatcaggtgaaacctgagtaaaatcggttggtgaaacgtttccgtaattcgaatgcaaaatcagaacccatgttagtataaacctggtttggtgtcaattaaagttgtaatagtacttactaaattttcattttttcgtaataatagtgtctttggacgcaaatttagacttaaaagagcattttttcgagaaaaaaacgcgaaatttgtaaaaaggttattgacaggatttactcatcgggcttatgatttattcgaaacgattcgaagaaatcgcttccacattaaaagtgttgtaatgaagtccatgtgaatcaacgttggttatgttttgaaacgattcgagaaaatcgtttcgataacccatcgtaatacaagggaatctacaacagcctgcaatccaacgccagagaaacgaatgagtaaagacagcaggcgatgatgagaggggttacatttatggcacatataacgatcgaaactggatcgccaaccttatgcatgaataccagcatacatgttgtgtccagtgactccggagagacttcaggcggtacactatatctgttgcacggggcaggcgataatgcgagtacctggcaacggttaaccacaattgagatgtatgcagcgcaatatggctgtacgatcattatgccggaagcgaatcgaagctattacaccgatatggaatacggcctgaattacttccactacatcactcaggagttacctgaaatatgcaagcgtctgctcaatctgaatcctgatccggagaaaacatacgttgcaggtttatccatgggtggatatggtgcactgaaatgtggactaacttatccagagcgatatcgcaaagtagtgtctctatccggcgtaacggatatccagacacggcttcatgatccccatatgccagcgatcatgatcaaggaaatgaaagcggtttttggagaacgtttacaggtaaaagccgatcaggatatttacgcactgtcggccaagctgctggaacagggtgttcctttaccggatatcctcagttgctgtggcgatagtgacccctttgtagagatgaatcgcgactatgcgaaatacatgcaggggactgcctttgattttcggtatgtggagacgccgggggctcatgaatggagattttgggagcaccacctgagaacgatgtttgattttctgtacaacgacaagaccatagtagagtgaggagatgcaatgtgaaacctgcagccgaaggacctagcaaaaagctgaagggaaacgtgaagggcaattcgctctggactgaaatctggaagcaccgaatgacatacaccctgcttattccggggcttgtctggctaattctgtttgcctacatgccgatgggtggcctgtctctggcattcaaagattacaaggccaacctgggcatctggggaagtccatggagcggattcgagaacttcaaatatgttttccgtgatccaacctttatcgacgcagtatggcgtacgctgtacatcaatattctgaaactgattattcagttcccgttcccaattattctggcgctgttgctgaatgaattgcggatgcgcagagggaaaaaattgttccaaaccgttcttacgttcccgcacttcctttcctggatcatcgtatccggggtagtcatcaatgtgctggcatatgacggactggtaaatagcgcgctcggattactcggattgccaacgattaacttcctggggtctgaatccaactttgtacccatgttgctgttgactgatatttggaaatcaagtggatggggcgcgattatattcctggctgccatttccggtattgatcaggatcagtatgaatcagcacagattgacggggcttcccgtatgcaacagatgttcaaaattactttgccgaacatccttccaaccatcacaatcatgtttattctctcggttggtggattgatgtcttccgggtttgaccagatcttcaacttggcaaatgccgctaccaaaaatgtatcggaagtactcgatgtatatatctatcggattacgttccagtcatctaccgatttctcattctcgacagcggtcagcttgttccgttccctggtgaatatggccttgctgcttcttgctgacagatttgccaagtggcttggcggagacggattgttccgataagagaggaggaaaaatgagatgagcaagaaagctaacaaaaaaccgagaattggtacagaaaaaatgacacttctcgattacattattttcgccgtattactagtgcttgccctgatgatcctgattccgttctggaatgtcatcatgatttcgtttgcaacacaaaaagaatatgctgacaatccatttttgatgttccctaaagaatggacattggattcctacaaggcattgttcgctgacggaacaattctgacggggtacaaaaatacaattatattgctagtcatcggcttgccactcagcttgttcctgacaacaagcatggcatatggccttagtcgcaacaaatttccgtttaagaaatttctctttttcctggtactgttcaccatgatctttaatggtggtatcgtaccgctgtacctgatcatgaaatcacttcatcttacaggtacgctgtggtccgttatcctggcgggaagcttcagtgcgtttaacatgattctgatgatgaactacttctacaccttgcctgaatcgctgatggaatcggcgagactggatggagcaggagagtggagaattttgttctccgttgttcttccgctggctacaccaattatggctacaattacgttgttctacggtgtggcttactggaacagttggtatgatgcgatgatattccttcgaaaagcggatcagttaccgctccagaatgtactccgaaatattatcgtgacatctacgacgaatgcatccaatgcatccagtgtggatgctgcccaggcaagcaacttctcaatgggtatgaagatggcggccgtatttgtcaccatggtaccaattatgtgtttcttcccaatgctgcaaaaacactttgccaaaggggtattaacaggggcaatcaagacctgatatacgtataggattttgcaataaaattctactaaaaaacatgggggtaaaacatgaaaacgaaaaaaaagttgtcagtaagagctctctttgccatcacgcttagtgtagttatgctgatggtgaccgcttgttccagtcaaggagcttcgggtggtaacgaaaaagatgcagagggaaattacaaagacaacctgaccatctctgtagctaacctgacagaaatcaaaaacgggaacctggataatgacttccacaagttctggacagacaaatttaatttaacatgggactacaactatatcgattgggattcatggggcgagaaacttcgtctgtggatcaactctggcgacttgccggatgtagcggtatggaactacgtacatggcgatgccattaacagcattgaacaaggtttgttctacaaattcccggatgactggaaagaacgctggcctaacgtggcagcagcttacaatttgacgggtcttggagacaagttggaagaattgacaggtggaacatatgtcctgcctagaccaatctatttcgaaaacaaaccggctgacccactcacgaaccaaattggtgtcattgcgctacgtaaagactgggctgaagcggttggttttgaactgaaagatgcttatacaacgaccgaattgaacgaatatgctgcactagtaaaagaaaaagatccaggcaaagtgggtaacaaacttgtacctctgtcctacaatgcggcagatgccatgacaaacatgattatgccaaacagtgtgcatgccatgactgactctccgttctacaaaggtgaagatggccaattccactggggaccagcagatcctgaaacgctgacaggacttaaattgatgcaaaaagcctataaagatggactgctcaatcctgagttctacacatggaaaaacaatgaaggtcaaaacaacttcaaagtaacaggtacagctgctgtaacaagtctgggcggactggcttcgtacagacaaggtctggattccgatatgaaaaaaaatctgggtgtagatagtgatgaactggtacacacagcaatcgtagtaggcgatgacggtaaataccgtaacatggaacaagccaacttctggtctgcattgatcttcaatccggagattagtgacgagaaattcgaacggatcatggatctgatcgattactccgcaacaaaagaaggacagttgctcatcaacatgggctttgaaggaaaagattggaaatatgatgaaaacaacgaactcgttagcttgttgccagaaggaacggtattggaagataaatatccagcacgtttcgaaggtctgtatctgcttggtgacgacttcagtgttgtaaaccctgcaatcaaaaaagattaccgtgatagagccgtgaaattgttcgaagaaaaagcaaaacttggtacagaaggcaaatcgcttgcaccatacgattgggatgtcaacctgtacgattccaaagctaagagtcaggcttcattcgactaccagaatgaatatgccaacttgatcctcaaaaacggagatctagaggcaaactggaaagaatgggtaaacagtaaaatgtccctggttcaaccttatctggatgagctaaacgataaattctagtaatcattcagtaattaattttgaacccggtgcgcggtctctccccgaacgcagccgggttctttatttcaacaacttgtagtggaggatacgatcagatgaataacgagcagttgttagacctggtaaaacagatgacgttggaggaaaaaacagctcagcttcttcagttgactgccaacttttatgaaggaacaaatgttgaaggtcagatcacagggccgatggaagagatggggattacggagcagtccgtggatgccagtgggtccattctggggttgtccggtgcgcaggccatcattgatgtacagcaagcttatatgcaaaaaagccgtttgggcattccgcttttgttcatggctgacgtagttcatggattcaaaaccattttcccgattccactggcgatcggttgttcatgggacacagaactggctgagaaaagtgctgaaattgcagcacgtgaatcagctgtatccggtttgcatgttacctttgcacctatggtggatctggttcgtgacccgcgctggggccgtgtgatggaaacgacaggagaagatccttatctgaacagtttgttcgcggctgcgtttgtacgtggatatcagggcgacagcttgaaggatgagccagatcgtcttgcagcctgtgttaaacactttgcggcttatggagcggctgagggtggtcgggattacaatacggtggacatgtctgagcgtaacctgcgtgagtactatttgccagcgtacaaagcagcgttggatgcgggcgtggaaatggtcatgacttcgttcaatacggttgacggtattccggcaagtggcaatgagaagttaatgcgcggcattttgcgtgacgagtggggctttgatggtgtattaatctcggattgggcttccattcgcgagatgattgcgcatggtgctgcagaagatgatcgtgaagcggcatatcgtgccattcgcgcaggagtagatatggagatgatgacaccttgttatgtacatcatttgcctgaactgattgagagtggtgaagtggatgagaagctcattgatgaagccgttctgcgaattctgcaactgaaagaaaagctgggattgttcgataacccacttcgtgcagctgatcctgaacgtgaacgtgagattgtattctccaaagagcaccgtcaggtatcgtatgaactggcaacgaaatcagctgtcctgttgaagaatgatgagagcgtgcttccacttcaacctgacgctaatgttgcccttattggtccttttgcacagagtcctgatattttgggctggtggtcctgcgaaggagttaaggaagatgcagttaagttgggaacagctctgcaagaacgcctgacgggtgggaaagttcaatttgctcaaggcagtaatgttcatacgattacagctgagcagattgccgaagccctggaagtggcaagcaaagcagatctgattgtccttgctcttggtgaagactccgagatgagtggtgaaggtggctcacgcacggatattcgtctgccagcagcccaattggaattggttaaacagctcaaagcagcgggaaaaccgattgccagcgttattttcaacggccgtccattggatctgcatggtgtaatcgatgaatcggatgcggttcttgaagcctggttcccaggcagtgaaggcggagcggcgatcgcagatgttctgacaggtgtagtgaatccatctgcacgtctgacgatgtctttcccgcagtccgtaggtcagattccggtctattacaaccatttcaatacaggtcgtccactgaacccggagaagacggaagaacgttatgtctccaaatacattgacagcccgaatgaacctttgcttccgttcggttatggtctctcatacacttcgttctcttatggtgatcttgaagtgtcaagtaacgagatgactgccgaagagtccctgagcattcaagtacgtgtaacaaacacgggtgagcgcgcaggcgtggagaccgttcagttgtacgttcgtgatgtaacgggtgaagtcgttcgtcctatgcgtgagctgaaaggatatgtgaagcttgcactggctccaggcgagagtggtacagccacatttacattaaatgaagaacaacttcgatatcaccattccgacttaagccaccgcagtgatcgaggtgagttccatattcttgtgggtgcaaacagtcgggatactcagaagaaatcattcagacttgtttaatccggtgaatggaaagagtaatgtgtcaggccttttgttatggaaggcctgatgaacataacaggggagcgaagaatgtggtcagtatcaaggatatcgccaaacaggcgggagtttccatctctactgtgtcatatgcgctgaatggcagcaacaaagtgaccgatgagacgagttccaaaattttggccattgccaaagaactgaactatgttccaaatgccgcagcaagaacactgaagaagagggaatccaaaattctaggtgtattcttgaccgattttagaggagatgtgtatggagacttgctgagtggcatgaaagccgtatgtaatgctcaaggctatgacctgatcgtgtgcagtggtaaacaatcccatcgcatgcttccagagagaatgattgatggtgcgatcattctggatcatacgtttgcaagtgaggaactaatgcagtatgccgatcgtgggcacaaaatcgttgtattggaccgtgagatggatcatcccaacattaatcaggttctgctggataataaagccggggcgacacttgcgatggaacatctgattgaacagggacataagaaaatctatgtggtgacaggaccggaaggttcgtttgactctgtgcagcggttaaaggctgtgagacaggttgcggaacgtgaagccgatgtggaatggattgagatcacgggagattttgagaagagtagtggagaacaagccgcagatcagattgtgcaggtgtatgatggacccgcagcggtattctgcctcaatgatgagatggctattggcttgtgtgatcgtctggcagacagtgcacttggcgttggtcaagagattgatgtcatcggattcgacaatattgaattgagcaaatacgtccagccgagattggcgagcattgattattccaagcgcaagtggggatcactcgctgctgaacaattgatcaaaattattgctggagaacccgttgatcatgaacgaatttatgtgacattagttgagggtgggtcggtgagtgggcctattctgtctgattctgttatatctatgcggaatgaccgggcggttagctattgatcccgaatacagcaagagacaaggcttagaagaatcgaatcattcttttaagccttgtctcttgttatttcgaggatgaagcaatagaaaaagcctctccggagagaggcttggcctttacaagccttttgttttgtcattgttgtaggatgaagtgagaatgcctgtaatgaagagagtcaatacgattgcaataatccagaatgtcagtgaaaatgacatgcccttcgcacctcctgcacaagctcattttcttctattataaccattataggtagaaaagaaatgcttcaccctattatttgtaaaataaaaagtgtgtgggcaccggtctgaggctgccatctgaagggttatttacaacccgattattcagaataagcgaggatgatccaccgccatccagattataggcgtcaatcactccaagcttgtacaaccgcccttgcaactcttctagggtagcaccggaacttccgccctcattatatccgtcaactacaataatcaataactgatcatctttataattgccaatgactgtacgtggtgctcgtttgggtgatactttccacttgtcgggaattggggttttccgcccattctgtagcagcaccggaacaaacgtagccccgaattgtggttgcaggcgatccagtgagtttttgtcggagaacttgcctccaaccagtttgccggtatcgttaagtccaacaaaaaacagatctttgaaactggcctggaaaccgttcacgtacttcccgtccatgacggttgtgctaagtggataacgtttgcccccactgtcagcaaatccacctgcgttaatcccggcaattgcgccgttacgcttcacagcctgcatggtcgtctcagaacgcccaggttcactgtctagagccatctgcatggcagtagggtcttttagcttgatcttcatggcatagcccttatagctaccaggattcactctgtacatttcaatcgttagccggtcactgtctacccgttcaaatggaacgccaagcttggatgaaatccggttgttgtaaatcttttccggacgatccgcttgggtggaagccttctgcacaagtgtagacatcgtacttgttgttttattatagagctgtgtcgttcttttaatagaagaagaagtctggacagcagcatcttttgcccccgcaagctcttggctaattgcttgggtccggggtgtaatcgtatcctctgacagttcggtaggcatcaaacctccgggttcaagtggaggacgaagcagcagcaggcataatatcaatccaacaaaaggagcgagtgcaagcataaaaaaacgattaacctgtttgacgggtgtaatcatttgagcaggtccatctttttctggagtgtctccagttgttttttgacttcgctcagctgggtatacagtttgttgctgttatccgttttgtcacttgcattatccttggtgaaagtcagcaattcattgaaggattgaacctgtccctgcaggtcttctacttcctttgatatcgttgttagctgattttcatagtcggtttttagcgctgcaatctgctgctgattatgggcttgaagctggttaatcatctgttgctggagatggttactataataataggttccaacgactcctagtgcaatgagaacaatccacattaccagaaacagtttgattgaagatccagccttgcctttggcgctccgggtgtgatggatgtcagaggacgggtcagatggtttcatatcatcactcctggtcatttataggtacaaaaaaatttccagtcctcattctatcatgcccctattgattacgcaaaaatgaaattctttacttaatagagtaaaaagagattgcatcggaaggaagtcctaggatacaatttcttatagatgcaataagtaggaactttgggcaggtttttcgacttttttagatagaaatgcaggaaatttatactatattttgacctttccggggatggaaagatggacgtcatggtgtttttataacaaaatacagtgaaaatagagcttttttatcggcttcctcctgtatttttctgtttttcgacataatccgacctatgcttcttctatactcggattgtcgcatagacgatgaaatcatcatgacagaatttaaaagttatttgtccaatacataacagggggaacaacaatgaaaaaagtatggcaggtggtcatcatagatatccaccccaccagcatgctcggtacaaaattgattttggaagagcagcaagatctgacggtacgtggtatgacttcgaccggaacagaagggctcgatctggtgaatattcaccagcctgatctgattctaatggattatcgtcttccggaaggtcaggcagatcaatatattgcccagatgaagaatctgtcagctcacagtcacatcattattttgacggatgaagacaatgtgaagctgtttcgtcatctgatgagccttggtgcaagcggcatgttatccaaacaggcttcccctagccagctgattcatctgatctctggattgcgtgagggccatgtgtccattccattgtcgtggttaaacagtgcggagtgggcgcaacctgtggagtctccgacagaagcacgtgtcattgaattaacagaaaccgaaacttttatcatggaaagaattgttcagggtgtaacctatgataaaatagcgaatgagatcaacgttagcagacgttccattgataattacctgcgtaaaatatacgtgaagctggaagtaaacagtagagcacaggccattgaacgttatgccttgcatgcaagacaagtgaagacgggatcctgacgaaacaggtttgttcttcccctgatcacaacagttcggtatgcatccggtcatattcgatggcgagcaggaataggttgtagggctgcggactgcgagtacagtttcggaatagggatgaaaggggaacggatcgatgaaatatttctttgcttcccgtaccaacaggcttttgtcatcaccactgagggatatacgtgagatgtctggcagggattatttcatttcactggcagaagaattgcctgcggaggagttgtttcctttcaaattgttggaagaagcagccgtgtctgtctttagttcaggcccctccgcattgcaatatggagagccagcaggctacacacccctaagagagtggttgaacaaagactggaatgcacgcaaaggcatacgaacggtacccgagcagattctgttgaccactggtacccagcaggccatcgatctggtgatgcgcctattgcttgagccaggagattctgtactggttgaacatcccacatctccaggctgtcttgaggttctggagatgcaaggagccaagattgtgcccgtaatgggtgatcgggacggcatattgccagaccttttggagcatcacatgcagcaggttagaccgaagctgctttttgctgcacccagtttctcgaatccgaccggtgctttgtggagtatggagcggcgggaggctgtccttgagttgtgttcacgctatggtgtactgcttgtggaagatgattcttacggtgagctccatttcgatggccttgagccaacggaattctatcgtaaatatccttcactctttgcactggatactgccgatcagggtggacatgttctctacattggttcatttagcaaaacggtagcgcccgctcttcgaaccggatgggccgctggacatccggcgctgattcaggcaatggcctcggttaaacgaattgcagatggtcagtccagtccgatgaatcagcggctgttatatcaattgcttgcccattccccttttcgttggagtgatcacctatcgatgttgaatcgggagtataagacaagactcaaactgatgcttgaactgttgaaaagacctggctggaaagggtgtcagtacaacatccctgagggtggaatgtatctgtgggtacagttgcctgaaggattggatagtggcgctctgcttaaggcggctttgcccaaaggtgtatcttttcttcctggatcactatgctccacaggtgtacaggatcaacgttacatccgattgaactttagccacccaggccgggatgaattgctgcttggcatgaacctgatcactgaagccatttccgaatttacggctcgtagctaagtcagatcaaaaatagattttgtagcaaaaattaaaattggttcatgaccaaagtgattacgttattgcatccactaacatttttatatataatatgaattaatgagttgttggtttctttatataagctacaatggtggccggttcaggaaaagcactcatatattttatctaacgggggaaaattcaacatgtctaatattttatttgttaaagcaaacgaccgtcctgcagatcaagcagtcagcgtcaaattgtacgatgcattcttgagcgcatataaagagtcccacccaggtgacactgttactgagttggatctctacaatacagaattcccattctatggtaacactgcaatcacaggtacttacaaagcagcaaacggttttgaactgacagctgacgagcaaaaagcagcttcacttgcagcacaattgcaagatcaattcctggcagctgacaaagttgtatttgcattcccactgtggaacttcactgttccagctccattggtaaactacattgcttacctgagccaagctggtaaaacattcaaatacactgctgaaggtcctgtaggacttgctggcgacaaaaaagtagctttgcttaacgcacgtggtggcgtttattccgaaggcccaatggcagctgctgaaatgtccctgaacttcctgaaaacagttctcggcttgtggggcattcaaaaccctgaagtggttatcgttgaaggacataatgcttctgctgatcgtgctgaagaaatcgttactgcaggtctgaaattggcttccgaagtagcagtaaaattctaataacaatcttctatatagaacacatcaaaacacctgtagtctccagtggagattacaggtgtttttttgccttctcattttttttcacatccgttacttcagatgattccatatcagatatggcctgtattttttaagtactgctccgctgtttcagcgatgtgtgcaaggtcgtccttattttcaccagatacagaatacgttacatcgagttcattaatggttcgttcaatcatatcattatcctcaagcatgtgtgcatgctcggttaacgcctgtactcccttaatcgtcagaatatactttccacgggagaggcgttcaaaccagccataataatttttttgcagaattgctgcggcagaacctacgcctgtctgtctggcaaggttggccggagaggcttctccgttcgtccgtagagcggatgcgacacgcaaagccttctcacgatatgctgtgaccagctgtcttcgtgtgctgcctcccgtattgtagtctccgctgcgttcgtcgaattccttgagcaatcgtttccgccgaacaccgcttttacgggcaacctgattggggccagtgagggggatcagggcggagggctcgcacaatacatcaatcaggggagctttggttttgtaaaatgtgacagtcagcagccccagaccgagctgtctgcatagtgcggtcagttcgctccagcgttggtttacggctccgcgcttactgcgattgcgctcgacggccagatacacgaacgggctaagtttcaagcgctgcatgccctgcagcaacagggagaggttaaatgtttttttcatctccacaatgagtggttcgtcctggtctgatctgactccgacgaggtcacaatgtctgacttccgccttgacgtcgaagccacgctgctcgaaaaaagccttcacaggcgaatataattcggtttcgtatttcactgccatcgtccgtgctcctttccagaagtggcctgtctctgaccatgtgttgtccggtttcctgaatttagaaccctcattatatcatattcgttcttttttttctgaaggcacaagatgtctgatagaacagggaaaagccaaaattcgaagcgcttgattgaaaaaaaagaggtcaacttatccgaattgccgcataggtatgtaatacacttttcacaacaaaacaagacgtttggacagagggtggcgggacaacacaggaccgcaagattggtattcaagcaggagccgcaattctattgatttcttcataccattcggaatggttgacaatcacactaaaggagccatgggaggtaccaagcatgaatatttttgaacgcgttgcggaacatcgggcagagagtgaccgtttgacatggaacggaacatttgaagattatattgcactgctgagagaggacccgactccggcaatgacggctcacgccagagtgtatgagatgattgaatcgtttggggtggaagaagtaggtgggcataagcggtacaagttttttgaacaggagatctttgggctggaccgttcgattgaaaagttggttgaagaatactttcactcggctgcacgccgtctggatgtacggaagcggatcttgctcctgatgggtcctgtaagtggagggaaatcgacgctggtgacgctgctgaagcgggggcttgaacagttctcgcggacagagaaaggtgccatatacgccattgatggatgcccgatgcatgaggaaccgctgcatttgattccgctggagcttcgtcctgaagtggaaaaggaaattggagtccgtattgagggtaacctttgcccatcctgccagatgagactccgtaccgaatatggtggtgatatcagcaaggtaccggtggaacgggtcattgtttccgaagataatcgcgtgggaataggaacgttcagtccatccgatccgaaatcacaggatattgccgatctgacggggagtatcgacttctccaccattacggagtttggttccgaatccgatccacgtgcctatcgttttgatggggagttgaacaaggcgaaccgtgggttaatggagttccaggagatgttgaaatgtgatgagaaattcctatggaatctcctgtcgctcacgcaggaaggaaatttcaaagcaggacgttttgccttaatcagtgcggatgaaatgattgtggcgcatacgaatgaatcggagtataagtcttttatctccaacaagaagaatgaggcactgcaatcccggatgattgtcatgccgattccgtacaacttgaaggtatccgaggaagagaaaatctatgccaagctcattcagcaaagtgacatgaagcatgttcatattgcaccgcatgcactgcggactgcagccattttttccatacttacccgcttgaaggaaacgaagaaacaaggcatggatctcgttaaaaaaatgcgcatgtatgatggtgaagaagtggaaggatacaaagaagctgatctgcgcgagatgcaaaatgagtatctggatgaagggatgtccggcattgatccacggtatgtcattaaccggatctccagtgctttgattaagcaaaatcttcagtgcattaacgcgctggatattctgcgggcgatcaaggatggtctggaccaacatgcctcgattacgaaggaagagcgggagcgttatctgaatttcattgctcttgcacgcaaggagtatgatgaactggccaagaaggaagtgcagaaagcatttgtttactcattcgaggaatccgcaagaacgttattcgagaattacctcgataacattgaagcattttgcaactggtccaagatgcgtgacccgctcacggatgaagagatggacccggatgagcgtctgatgcgatccatagaggaacagatcgggatctccgagaatgcaaagaaagcgttcagagaagagattctgatccgaatctcggcatactcccgcaaggagcgcaagttcgaatacagcagccatgaccgtttgcgtgaagcgattgagaaaaagttgttcaccgatctgaaagatattgtcaagatcacaacctcaaccaaaacaccggatgcaacacaattgaaacgtatgaatgaagtcattaaacgtttaattgaggaacatggatacaccgcagccagcgcgaatgaactgttacgttatgtgggtagtctgcttaatcgctaatcggcaacgaaccattccggatcaggctcctgatgcctgttgtgaggctccttcacagcagggtcagggcctttttaattacatgaaggtcatattagtctaaaaagctgacaaataaggttaattttaaagagaattagttctaatggtatatgtatatttaggtattttagtctataatcaatacatatatttacaatttaaagtaatttagtgtttattaaggagctgactgaaccagatatgagcagtatttccgcaacaagacagaagcaacttgattacatgggattaaccgcaggggatctaaaactgcttgccgatcatcggcctgtttttaaaaaagtcgttaatgaagtggtggatcatttctacaatcatgtggggaattatcctgaattggtagatctgatcgctcgattctctaccattgatcgtctaaaagaaacacagaagatgtactggttatcaatgacggatggaatcgtggacgacgcatatattgagcaacggattgcgattggacttgtgcattcacggattggtctgtctgaagattattatctgggtacctatatggtctacctggatattgcaacgagcatattccaacaggttatccctgattcctggcatcttgtcattcaagcgctcagcaaaatgtttaatctggattcacagcttgtccttgaagcctatgagaagaaagaaaaagaaaagttacatcagcttgccgatgaccaacaacatacattacaggcaattacgcagattacccaagagcttacaggcatgattagtgaattaaatgaaagtgcaatggcgatatcaagtgtagccaaagaaacagcggcttctcaggatcaggctcaggttatgcttaccgaattaacaggagagatccagcagatcggaaaaatgggtgaactcattcgcgagatatcggatcagagtcatcttgtcggcctgaacgcagcgattgaagctgctcatgcaggagagtttggacgtggcttcgaagtagtcgctagtgaggtgcgcaagcttgcagccagttcccgggatgcccagggtaaaattcagtctaatctggagcagatcatgaagaaactgagcagtgtgcagcaggagtcggatcatacttccagaggggcacgtagccaagcttcacgctcggctgaactcgctgtatttgcaacaacaatggagaaactgtctctggatttgaagaaactggaacagcaggaatagagcttaaaagcattaggaaccttccataccgtttcaggctgttttaagctataatgggtagacaaacctgccgatgttatagaaaatgcagccggagacaggggatttgaaagaggttgaggtgatcagatggcttctatccatgatgtagccaaggaagcgggagtatctgttgcaaccgtttccaaagtgataaacgattatcctgatgtaagtgaaaaaacacgcaaaaaagtcaatatagccatcgaattattgaaatatcaacccaatgtggtcgcacgtggacttgtcaaacgccgttcatggacggtgggagtactgttaacggttccgtttacgaacccttttgtgtccgagttgctggaagggatcaagacagcgctggagaacagtggatatgacctggtccggttgtctactcgattcgatgatccggcgtactcgttcatcaaacattgccgcagtcgtaatgtggatggcgtagtagtattcggggaaggcagagaaaacgcgagtattcaggaactggtggatgcagagattccaacgatgtttgttgatacggacatgttgggcaaacgtgccggttacattactacggataacgcgaacgggatctcgatgggtgtcaaacatctgcatgagcttgggcaccgcaaaattgcctatatctcagggacacttggacctgctgtagccaatctgcgattggaaggatatcgggaagggctgcgagaatgcggcatcccgtattctacggtatatctggagatctgcgattattccttcgacgggggaagcaaggctgcccgacgattgctggcacttcaggatcaaccaacgggaattgtctgtgcatcagacatgtctgcctttggtgcgattcatgaaattgaaaagcatggactgagtgtaccagaagatatctcggttgtcgggttcgataacacgtattatgctgaggtattcaaaccggggttgaccacggtgaatcagaatatctattccattggcattaagtccattgaatatctgattgccatgatcgagaatccatcttattctcctcctgtggtgacggaaccttccaatctggtcatccgtcagacgacagcacctttaaaagcttaaaaacgtaaatagtaaagatgtttacacgaagcacagctaataagctgtgctttttgtcgttatatatctcatttggaaacatatggattagggagtggtacaagtcctatagtttaacgggtaaacaaagtttactggcaatcgtataatgaaagtgcttacaattttctgtccatttgcatctatccatcctgtataacgatcttgtaaagggctggcacatggcagagcaaaggttattcttcacaaacaacgaaccaaggaggagatcggatgcatttgagaaaatggtggagcttgtgcttgtcggctgtattgatcttcagtttgttcccaagtgtgggaacaggagggacacgtgcttcggcagcggacgttaagactggcgatgatgaagtactgttcaaggctgattttgaagatggtgtgttgggacaatggcgtccacgtgcaagtgaaaagcttgatatcgtaacgcaagtaggtcatgacagtacacgcagcctgagaacctcttcacgtaccgaaacgttccatggacccttagttgaagtgctggatcatgtacagaagggcagcacagttcatatttcattttgggccatgtacgatgaagggccggacagtcaggtccttaacggtgcactcgagaaagaatacaataaagacgcttcgagtcttgaatatgctacctttgcctccgctaccttgaacaaaggacagtggaaaaaagtcgaggccgatgtggtgattcccgaagaaaatagtggcatcaccggattccgcatgtatgtggagacaccatggaagacgtcagcggaagtgacgccggcagatacgatttcattttacgtggatgatgttctgattacggctgctcagaaaattgaaattgagaaggatattccgaatctggtcgatatcgtgggacaaaattacgcaatgggagctgccatcaaccagtctgcactagacgcggaaaaccagcattcccagttgttgacgaaacactttaatagtattacagcggacaattttatgaaaatggatgcgatgcagcccaaggaaggagagtttgtctggtcagagacagatcgcctggtgaagtttgccgaagcaaatgacatggaaatcagaggtcatacgctgttatggcatagtcaggtgccgaattggttctttacagatccgaatgatgcatcgaaacctgccacgcgggaacagttgcttgcgcggatgaaaacccatattcaaaccatcgtgacccggtacaaaggaaaggttcatacatgggatgtcgtcaatgaagtcatctcagacggaggcggcttgcggaatgaggccagtaattccaagtggagagatattattggggatgtagatggcgacggagatgacagtgattacattgagctggctttccgttatgcacgtgaggctgaccccgatgctgtactggtgattaatgactatggaatggagggcaatggaaacaaggtgaatgatatggtgaagcttgtagagaagctgcttgccaaaggaacaccgattgatgcagttggattccagatgcatgtatccatgtacggaccggatgtaaagctcattcgtgaggcttttgagaaagtgatcgctcttggtgtaaatgtacaggttacagagctggacgtttcgatctattcgagtaattctgaactggagatgcctgtcacagatgaattaatgctgcaacaagcttaccgttatcgtgaactgttcgacctgttcgacgagttgggaaaacgcggcgtaatggacagtgttacagtctggggacttgcggatgatggtacatggcttgacaatcatccagtcaaaggacgcaaagatgcaccattgttatttgatcgtaaattaaaagcaaaaccggcattttgggcactggtggaccctaccacccttccgatctatcgtaatgaatggacagcattgaaggccagcccttctttcccgaatcacaaaggacaggaagatattctttggggtgctgtgaaaggactcgaaattaatcatctggcagatggtacatctgcggttacgggtgaggctcgtatgatgtgggatgccaaaaaggtgaatttacgagtggaagtgaaggataccacacgtcgcaaaggggatcaggtgcaggttttcctcgcggaagaagtcaaggggacaggcgttgcaacttctgaggctgatctgtctgccaagaagaaaaatccgccgtctgcaaatggtcaatatacatttaaacgggatggcgctaaaggcaaagataaaaatacttacaacgtacaggagacaaaaaccgggtatgttgtatacgcatcactgcctatgtcagctgctttacttaccgaaggccaggtcttgtctctggattttcggattacggatgaacatgctgctggaaagacagcgaccattgtttggaatgatatttccaatcaacagcccgacaaaccagccaaccggggcaaactgaagctcggttctgtcttgaaacaaaccaaggtcacttatggcaaacctgtcattgatgcaaaaaaggataacgtctggaaaaaggctgcatctgttaaaacggatgtctgggtggtcggaaactccggtgcaacggcgactgcacagctgttatgggatgagaaatacctgtacgtattggcagatgtgaaagatcctttgcgaagcaaattaagttctaatgcacatgagcaggattcaatcgagatttttatcgacccgagcaaagatcagacaacattctatcaggaggatgacgcccagtaccgggtcaattttgataatgaggcttcttttggtggaaatgcacggaaagaaagtttcaaatcagctacccgattaacaagcggaggttatacagttgaagtggcaatcccactagacagcgttcgtgctgaagggcaaagatggattgggtttgaccttcaagttaatgatgatggcgctggggatggcaagcgaagcagtgtgtccatctggagtgattcatcaggtaattcttatcaagatacttccggcttcggcagtctgttactgactcgtaaatagaatatttagttgtgaattagaatatgagaatgttagttattcaacattgtatatctggaaataagtgttgattttaaaggctgggacgtttagactatatacattcatataaacgggttccaatgtatgacaacggcttcaactaagtctgttgtcacgagtcaaatgatgcggagggagtgcctgtcatccagacagcgcactcgcttcttttttacatttttgcatacatacaaggcatttcccggttgaaaggacagagtgagtggagcacctacatggcacgtacaacttagaacttgttattttatcctatattattgcatcgttagcttcatacgctgcccttgaccttgcaggccgtgtaagtcaggctaacgggatggcgaggaatgtatggcttacctgcggtgcagtatcgatggggctgggaatctggtccatgcatttcgtaggtatgctagcttttgttctgcctacgcaagtctcctattccaccggtaaggttgttttatctgttctacttgctattgtcgcatcgggggtggccttgaacattgcgggtagacaatcgggcaggataagcaagctcatgattgctggactactgatgacggcagggatcagctcgatgcattatgtgggaatggcagcgatgtcaattccggttacgtatgaaccaggcagagtggtgttatctattctgattgcagcgcttgcttcatttgcggcattgtggctcatgtttttcttccgttatcatcaatcaagacatacctgggtttacaagatgggcagcggtctcattatgggtattggaatctctggcatgcattataccgggatgtcagcagcacatttccatcattcacatggctcgatggtaagttcaggtatgcagattgagccaggtattctcgcctacttgatcgcatcgggcacatttattgctttgggcttgacgttgtttggcatatttatcaatcagcgaatgtcacagaaagatcgacggattcatgagaatgagcaatggtatcaggccctgtatcataaccattcggatgctattatttcagtgaacaaggaaggtattgttaaagggattaatgctgctgtaacaacaatcactggatatcctgaaaaagaggtcatggatcgttccattgatgagatcgctcagcaaatcgatatagagtggataagtgaatttgattccatcgattgggatgatcatgggctggagcaggcgcactacatggccaaaatgagagatgtgcagggtgaacttctggaccttagtattgttgtagttcctgttgtcattgatggcagacatgtgggaagtcacattttgatcaaagacgtaacggaggagaaacaggctcaggagaagattcgtcaccaagctttgcatgatccgttgacggggctgcccaatcggcgcaagttggatgatgtgctggcttgtacgattaacgattcagcagaaaaagggaactcttttgccgttatggtgatggatatagatcgtttcaagatgattaatgactcgctgggacattccattggagatgtatttctaagagaagtgagcaaccggatcatgaaagccatagaagcttctgatcccttggctatggagaatgtcatgctggcccggatgggcggggacgagttcacactcgttgtgacccagggtcaagcgacagaagtaagagtggcagaacttgcaaaacagattgttgaagccattcagttaccttatcgactgaaggagaatgacttttacgtaaccgccagcattggaattgcgatgtatccggatcatggagtgggtgtggatgctttgctgaaacatgcggactccgccatgtatgaagtgaagaaaaacggcaaaaatggtttccaattctacactgcccaactggattcggaactatatgaacgcattgagctggagggttatcttcgtaaagcgttggaacgcgatgagatggtcctgtactatcaaccacagattcgtaccgaggatagccgcatgattggtgtggaggctcttatacgttggaaccatccactcaaaggtctgctcgcacccaatgtgtttatcccgcttgcagaagagacaggcatgatctatgagattggcaattggacgctgcgtgaagcatgcaggcagatgaaactctggcatgccagtggcggaccactcattccggtatcggttaacttgtccagccagcagttccaccaatccaacttggtagaacaggtcaagaatgcactcttggagacagggctggatgcccgatatctggagttggaaataacagagagcatgatgatggatgcagccgtatccacggcgattcttaatgaactgacagcactgggtgtcaagatcagcctggatgatttcggtacgggatacagttcactgagttatctgaagcatttcccgattcacaagcttaagattgatcgttcgtttgtgacggacattacagagagtcacagcgatcaagccattgtggcgaccattatatcgatggcacagaatctcaagatggaagtgattgcggaaggcattgagacgaaaggccaactggatattctgatgcagaatgactgccgggaaattcaaggatattatttcagtcgcccactgccggcaagtgaagtggagcatgatttttttgtgccgctgcgattgcagggtaatggtacaccgccggcaccatcctaattttatgtatgccaagcagcaagtccccgtgtatgtcgggaacttgctgctttttttatttcttgtcgtttcctataatgataattgaaaaccttacataaacttgcgatggtgtttcttgccatcatacgtaaaccagatcggtttatcctcgacacgtgtctcgacatgtacggtacgtccccagaggcgatacagatagggcagagtgcgttccatatatttcagatccaactcaatgccttcatattgatgtttgagcacgagttcccctgtccgcagataatcagcatcttgcacgaccaagtaaggggagcccccgttgacacgtgaaaatacgagctgatcccgtatgttctcccaggacttgtcggtgattttccagtccgggccttttttctcaaatacgtagaggtccagatcctcggttaattgcttggtcatgtaattgcggataaaggaggtatcggaatcgaattcacgcacctcgaacattttggcacgaccttgccctggtttgcggccccaacgttcctgttcttcacgggttgggttatcccagcgccgttcaatatcctcaaagatcttcagtcccaaataatatggattcagactttgtttggatggctgcaccacggaggagttgagtttggcaaattcgatcgtatcctcactgttcagatcgagctcacggataatgcgttgatgccagtaggatgcccagccttcgttcatgattttggtttccatctgtggccagaaatataacatctcttcacgcatcatactcatgatatcccgttgccagtcggtcaacacttccgagaattcctgaataaaccacatgacatccttctccggttcaggcggaaaatgatgaacctgaataccttcagcgggtgcttcttcggtctgcacgtcatcaagtgaccacagatcatcatagcggccttccggccgtggttttttctcaccgcgctgctcccgcattttcatctccatgtagcgttgtttgtccaaatggcggggtttaatcagctgtgggtccacatgttcctgaattgcgatcacggcatcgataaatgcttcaaccgcttccgttccgtattccatctcataattgctgatccgatccgccgtagcggccatgctttcgaccatattacggttggatttagagaagcgggcattgtttttgaaaaaatcgcagtgtgccaatacgtgggctacgatcaatttgttctgaatcagggaatttccatccagcaagaaggcataacaagggttggagttgatgacaagctcataaattttgctgagtccaaaatcgtattgcattttcatcttatgaaatgttttgccaaagctccagtggctgaatctggtcggcatgccgtaggctccaaatgtataaataatatccgatgggcaaatttcgtaccgcatggggtaatagtccagaccaaaaccattggcaatctccataatctcggcaatagcgtattctaggtcgcggatctcatctgtcatctaacgctgcctccttcccgtttctggaaaaagctgcgcaaagctttgtacacttcgcctttttctttgatcacataatacatgaactgatccatcttgatatgacggtaagccgacatcagtgtgctgctgcggttgtactgattcacttcgccgtatccaaacatattgctacgcttcattaactcaccgatcagcttcacacaccgttcgttatccgaggtcagattatccccgtcagagaagtggaaagggtagatgttgtagctggaaggtggatacctactgtcaataatatcgagcgccttcatgtatacagaggagcagatggtgcctccgctctcgccacgggtaaagaactcttcttcggttacttccttggcttccgtatgatgggcgaggaaaacaatctcaactttctcatactgacgacgtagaaaacgggtcatccagaagaaaaagctgcgcgcacagtatttctcaaacgaacccatggacccggatgtatccatcatggcaataataacggcattggattgtggaatgattttgtcttcccatgtcttgtagcgcaggtcatccggactgatgtgatggatgcctggtgtaccggtcgttgcattgcgacgcagattctccagaatggtacgtttcttgtcaatattggactgcatgccttttttgcgaatatcgttgaaaactaccgtatgtgtctcaatcaggtctttgtctttctgcttcagatcgggtaattccagctcagcgaagagcatatcttccaattcctcaatactaacttcggcttccacaatatcatgaccaggctgatcgccagctttttcacctttgccgggtttctgcgaagcagagggatcccgaccgatgacgtctccgacctgactgtcaccgtctccttgaccgacatgtttttgcttctggtagttatacacaaaacggtactcatccagactgcggattggtaccttgatgatttgttttccatcagacatgatgatgttttcttccgtaatcagatcaggcagattctgcttgatgacatctttcaccttttgctgatggcgctgttggtcctggtaccctttgcggtgaagcgaccaatcttccttcgacacgacgaacgagtaaggctggtgtgaatttgacatgtaggcaccccccattgattacgcggcacagtttggcctgtcggtaattaagtatattcacgggcgaggacgatatgtgatgagagtggatataaaatgatacaattacgcaagttcacctcagaggtaaggtgagtcgtaagaacagaactgcaccattttttacagaaacagtgaacaagtgtgatatccttcctatacaataggagaaagacatcgatctggcatctaatagaggttgtttaaaaagtccacttagacttgttgaactcgcactaatatagagatgcatgtaaaggaaggatttatgtgaataaaaaggcgatcaaggcttggattatgtatgattgggccaactcggcttatgcaacaacagtactggccgcagtactgcctgtattctatgcttcggtggctgcagcaacactggatacggacaccgccgcctcctacctggcctatacacactccattggcatgttgtgcgtagctctgctaacaccgttgctaggcacgctagctgatttgtcaggacggaagggcgacttcctgcgtgtatttgcaattataggcgtccttgccacattgggattcagcgcaatcggtgaaggggactggttccttgcttccgcgttgctggtcatatctacgattggttttgcaggtggtaataccttttacgatgcaatgctgccagatctggtacctgtggaacgaagagacatgatatcctccaaaggttatgcctatggttatattggaggaggtttgctgcttgcggtgaacctgctgatgattcagcaaccgggctggttcgggatgagcagtacactggcaggcacaagacttgcttttatctccgtctcgttgtggtggttgctgttctcgataccgatcttccgccatgctccgagacggcctgcatcaccggagctgcccggaacgtggacagggtatgctgcggtgggcatacgcagactgcggcaaacctttcgtcagatgcggcgttttccccagttaatccgcatgttggtggctttctggttttttaatgacggcattaataccatcattctaatggctacgatctatgggacaagtataggcataggcacagccgacctgatgctcgcgctactgttaacccagttcatcgggttcccgtgtacattgttactgggagcatgggcacagcgttggggagcaaagcaggtattaatcgttagcttatcggtctacatatgtattgtgattctcggttatttcatgacacaagcgatccacttctacgtactcgccgggttggttggtgtcgtgcagggtgtgagtcaatccacagcgcgttccctgtttagcaatctgatgccagcaggcagaacaggagagtattttggttttgtgaatattacaggcaaattctcctcgatctttggtccatttgtgtttggatatgttgggcagatcacgggttccacacgttggggtattctgtcgctcatcttctttttcgtcgcgggcattgctgtattgttaaccgtgaaggtacagaaggggttgcaggatgctacacgggcagatcaggaagaagagcgaaatgggagcgttggagctactgggaaaagttcagatgtaagatttacctgatggttgttcacccgttttcatattaagtttctcaacggattacgtatggcttcaggccttgttcctcacagaacatgtctggagcttattcgcgtttgtgcaatcagaacataattgatccatgaataagtgcttaaatgacagacagcagaatacagtgaaagagtatcaatttatgaaaaggtgaaaataaaagattgacatgatacattttgtatcatagagtaaaactataaatacatattgtatccgagagttgtcgaatgtaatcatgtgttttgcttcattcccgggtgaacttccgacggaatattgcaaaatgctgacctatagcgtgcatattactcgtttttccaaacacaaaggtagagtctggtctatcccagctacacatttatactaatgaacagaggagaggctgccattgatcgatgctcaaggtaacggacttgttttcttactatgtgttccccgcagtggtagttccttatccaccgtaatgctgcaaaatcatagtcgtatatttgccacccaggaaatgtggtttctgatgaatcttgtcgatttacccaaggctgattcacgtgcttacggtggcagctccatcatgcgccagttctacaatgccatggtatctgaggatgtctttgagaaggcgtgcagaagttttgctcttgaaatctacaatggattcctggaggggagcggagcagacttcatcgttgataaatctccacggtactattacatgctggaatggctggatcgtctgttccctcagtccaagcgcattcatctccagcgtaatcctctggccgtagctgcatcattcaaaaaggtaaaccgccatacaggagaaggattcgacctgattcatagtctgcagagccccaaattaaatatgaaatccgtagatctcacacttgggatgctccgcttgaatgattattttgccaaaccccattccaatgcgtatgaattgcaatatgaacgattggtttccaatcctcaggaagaacttgagaaactatgcgcatttctgggaattcgatatgaacagggaatggagcagtatggacagtttctggacagtgccaagtctgacatgttctacagtatgggcgtgggtgatcctttcctctcttcgcatcaagaggcacatcagggttctgttaacaactggaaaaacatattagaaccacatgaagttgaactgtattgccgtgtgatgggggcagatctgttccaccagatgggatacagtgaacagctggcagaagccgaacaatggacgggtgtacattatgatgcaagtcctgatcaggaggtcattgatcgaatcacgcatcagttgacagcagcgaccggttgccagtggcaaccgcaataccgaatgcagccagcagattctgtcgttcatgatccgcttgggaatcttaatgaccaagttgtcgaagaaccggaaaagacagacccgacgctagctgcactggtaacgatcagacagctgcaagccgcattacgggcagcagatcatcgtctggaacggggttacagtgagcgagaacgcttgaaggtccagctggcttctgctcaaagcaaaatacagcgtatcaaatcatgggtaccatttggtcatcagatcagcgcctgggcttcacagcgcaagattctacggggaggcaaatcatgagcgccatagcaggaattgttcacaacgatggtcagcaggcgctatgggaagacagctggcgtctgtacgcaagcctggggcatgtccctgcggatacaacaggagtgtggaaaggcaatgaggcgttcctcagctgtcatgcccaatggattacaccggaatcggttagcgagaagttgcctttatatgatgaggaaagtggtctgaccatcacggcagatgccattctggataaccgggaacaactggcagatcaattacaaatatctagagctgaactggctatgttggcggatagtgaattgatcttgcgtgcctatcagcgctggggagacgatgtagccgtccgattgctgggggattttgtattcgcgatatgggatgagcggaatcgaaaactgtatgcagcgagagacattacaggcatgagagctttttattaccgacatgatggttcacgttttgctttctgcacactgatgaatccgttgctcgggcttgaaggggtacataaagaacttgatgagacctggctgtccgaattccttgccattcctgacatgcatgattcagcagatatcaattcaactgtatatcggggaataagccagctgccttctgcacatacacttgtcttccgggatgggagactggagctgaagcaatatcatcgctggaatgaagtggaacctctaaggcttaaatccgatggcgagtatgtagaagcgttccgggaggtctttgggcaggcggttggatcacgattgcgaacgcacagacaggtggctgctgcattaagtggcggactggactcgggagccgtggttggttttgcttccggaacactgagaagtcagggcaaacggctgcaggcctatagttatgttcccgtacccgatttcacagattatacgtcgaaaacgttgctcgcagacgaacggcctttcatacgttcaaccattaatcatgtcggcaatatcacggagaactacctcgattttgaaggcagaagtccactcagtgaagtagatacctggctcgacattatggaaatgccctataaatactttgaaaattcattctggattcgcggattctatgaaaaagcgagccagcaagatgcaggcatcctgctcacaggggcacgtggtaatttcaccatctcctggggaccggctctggattattacgccagtctactgaaaagtggccgctggtaccgatggttccgtgagatgcagcagtatagtgaacgaacgggcatgcctttctcacgtatagccaagatcaccgggaaaaaggcatatccggattggttcaaggctcagtccaaaggagccagccaggccgcatccgtacaattgatccatcctgactttgcgcagagaacgggtgtactggaaagactcaaatccattattgttctgcagggcggtgcccaggctgatgcactcaaagtacgtgccgagaaatttaataacctggccatcgccaacaaaaacggtgctgtagctacgaaatgttctctgcgttaccgcgcttgggaacgtgatccgacaagtgatgccagagtcatccggttctgtctgtccgttccgattgaacaatatgtgaaacaagggacggatcgttcattgattcgccgggctacttcaccggagttgcctgacaaggtcagactgaatcagcgggtacggggtgtgcagcctgcagattggttacatcgtatcattccgaattgggatgcctttaccgctgagttacgtgctttgtgttctgacagcaaggtcgctggcatattaaacacggagcgtatcaaatccgccctggccaactttccaagtccgagaccagagcttgcttcacatccagatctgcgattgatgatgcatagtctgatcgtctatcggttcattcggaaattctgatatagcccggtgaactgtgggcccggatttttcttacaattgactcatgataggaggtgaatacgatgcaaatggaaaaaaaggaatggcaagcaccagcactggaaatattggaagtcaaccaaacaatggcgggcacaggttacaaacatatcgactgggttacggttcacgatgcggatctctacggaactagttagaaatctttaccatatgccatcatacttagaagtgcgaaaaggaggtgaatacgatgcaaatggaaaaaaaggaatggcaagcaccagctcttgaagtgttggaagtcaatcaaacaatggccggtactggctacagacaaattgactggatcacggttcacgatgcggatctgtacgatccaacttcctaagttgtttagttttatgaagtgtcatcatacttaaagggcggaaatgcaacaaatccagcttttcgcctccgcccttatattgagcaacatgaatataagggctttttttacattttattacgaaggaggcgtcgttcattgttgcctgtgcattatgtggcgtatggtctgcgctggtcgagccaaattcgaatgcctgaactacagatcgcacccaaggatgcagagactgattttgatgtcgtggatgtgcacatcgagtcttcagatctgaccctattgtgggagggttgggatgtaggcaacgacaactttgtggcacgagagggcagtctttttttcaaaatcgaagatacaggtctgtttctaatggaacaaggaaagcgcattgttgtatcccctcagccaggagcggatgagaagaaggtcagattattcatcctgggcacctgtatggcggtcattatgatgcagcgtggcatccttccattgcatggcagtgcagtggttattgatggctgggcttacgcatttgtcggacattcgggagcaggcaaatcgacactgtcggccgcactggcatcactcggatatccacttctcaccgatgatgttgttgcactgacctgggatgccggaggaagagctatcgtatcacctggttacccgcaacagaagttatggcagcccagtctggacggcttcggcatgaaggaacaggattatgcaacggttcacgcagagattacaaagtatgcgatacctgttcagcactattttcatgagatggccgtaccactaggtggaatattcgaacttgctccacaaccggaggaaaaccatacatctgttcaactggttgaagtgacggggctggaacgactgcatctgttatgctcgcatacgttccgtggtggactcgttgcaagacaagggctggcacaatggttgtttgagacggcttcaagactttcagcaagtgtggagattggcagattggtcagaacgggtgctgagtttacagcatttgagatggtgaatcggatcacagatcatatacgtaaaggagtgcattcaggacaatgacagcaactacgccgatgaatgtggaagaccgggtaacccggaaagaaggcaatctggtcagtgatatgggcagtgagaaagtcatgatgagcattagctctggaaaatactataatctcgggagtaccggtggacgaatctgggacctgatcgcagaagaacgcacgctgggtgaagttgttgaggtacttgctgcggagtatgaaattgagccagatgtatgtcgtgagcaggtggtgcaattcctggaacatctgtcccgtgaaggtttaatcgacgttactcgcggagtgtagaatcatgttgcgaaaaataaaggcttatctatcactcccgcggtcgatgcgtcgactggtatgggaggcctatatcctccttggctgggcacgcatacagaaggctatgccatttgctaaaatcgcacaagggctgggtacgcctatggtagaaacaccgatgacaggactcgaacgcagcgaggtcatcactatacggaatatttccaaagcaatttcgctcgccagtaaatatacgttatgggaaagccgctgccttgtaatggcgattgccgggatgaagatgcttgagcgacgcaagatagagagtacgttatatatggggactgcgcggaataagcaaggacatatgatggctcatgcctggctgcgaagtggtaaattgatcgtgaccggagctgatactatggaccaatatacggttgtcggtgtgtttggcaaacggtgtccggagaagggatctggggagattgtctatgatacatgaaagtgaactctattcatcagggtttccgaaggagcttaagctgattttgagcatgattagaggtgatctgacggctctatcccctgaagaactcaaggcgggtttgcaaggaaccgattggcagctttttctgcggcttgtctatcatcaccgcttatactctgtcctttatgtgaaaatgaaagaattcaactctgcaatcattcctgcagatgttatggagagtctgagacaacaatatacggtcaatacgttccgcatgttacatctgacagctgaaatggagcaggtgtgtggagcttttcgtgaacgtggtatccgcaatattacactaaagggaccagcgctcgcccatgatctctatggcgatgtatcgatgcgaacctccaaagacctggatatcctgattccgtttgatgatgtggaagcggctgaaggcattctggctaccctcggatatgtatccaaggaaggggagcgggcacctacggtgcgcagctggaaatggcgggaacatcatatctgttacacccatccggtcaaaaggactcaagtggagatccattggcgtctgaacccggattcgggtaaagaaaccgattttgaattgctgtggaaacgcagtcggttcagttcatacacacagacacctgtccgtatgctcgaacaagaagacctatgggcctatctcgtaacccatggtgcacgacacggctggttcagactgcgctggttactggatatcgaccagatgatccgcagcatgccacttgatgtgaagaaattagagagacgtctgaaagcggagggacgtttatccattggttcacaggctctttatctggcctcggagctgctgaatacgccgctggatgtagagtacaggtccttgatgtccttgagtgaccttacaggcaagcgattagccaacgaaggcgcaaagttcatgaacgacatgctggaaagtccggctgatatgaagtcttatcaatcgtatttgtttaaacttcgaagcacaaaacagaaatggtttttctttattgaacgtttatatccaagtacatgggatgtggatcaattgccgcttccgcgttctttgttttttctgtactttccgttacgtccgtttctctggttctggcggcgaattaaaaggtatacggtgacggaaaggggtaaagtatgatctcggaattaaggtatttcatgcgaaagttgcatcatgtcacggggcccatcttatattggaatctgctagggatgatctgtatcagtctcatggaagggatcggtatctacatgcttgttccgatgctgagtctgattggcatatttgagatgggctccacaggcttaaacattccctggcttggcgacgtgttgaatcgtttttctgaaaatagccaattgttactcgtattgttcacctttgtgttgattgtctccggacaggcctggatgcagcgtctccagacgatccgtaatactcgaatccaacagcaatttgtacgaacgctgcgcatggaaacctatggtgctattattatggcgcaatggtcattttttctccaaaaacgaaaatccgattttaaccatatattaacgactgaacttgcacgtgtgagccagggaacgagcattatgctgcaaatggcagcctctctgatctttacgggcattcagatcggtcttgctttctggttatccgctaagctgacggcacttgtgctggtctgtggattggtattatttatcgtcttacgaaaattcgtcaagcgcgccaagcagatcggggaccagacctctgaattctcgcaaagttattataacggcattaccgagcatttcaacggcattaaggatattaagagcaacatgcttgagcgctcacacatgaactggtttgagcgcatgtgcagacagatagaacgaaatgtcattcagtttagccaattgaacagtggaacacagctgattcaccggatgtccgcggcaatcattattgcggcattcatctatctttctctccgtgtaatgacggtgcctcccgcaagcctgctgctcatcatcctaatcttttcccgcttatggccaaggtttacggcaattcagtccaatctggagtacatcagctccatgctgcctgcatttcgggtagtcagagaattacaagcgcagacggcgaagagtcgtgagattagtgaagagattgcttcggcaggagacgttggaactgaagggattcaacctatggaactgaaggaatctatcacctgtgaggatgtctgctatcgctatgagggaagtgatacgtactcattgcgaaatgtgcaagcttcgattccagcaaggggtatgaccgcaattgtggggaaatccggagctggcaaaagcacgctgatagatctgattatgggccttgtgaggcctgaaactggtcgtattttgattgacggtgtgcctctgtcagaagaacgattattgagctggcggagttccatcggatatgtctcccaggacccattcctgtttcacacaagtattcgtgagaatctgcgtctggttgatccaaatgcaagtgaagaacagatgtggcaggctttgcaattttcctcctctgcggcatttgtacggaagctgcctcagggtctggatacgatcattggtgatcggggcattcgtctatcggggggcgaacgtcagcgattggtgcttgcccgggctatgctgcgtaatccttcagtcttggtactggatgaagcaacaagtgcgctggacagtgagaatgaacagtacattcatgaggcgctggaacggttaaaaggacatgtgaccattatcgtgattgcacaccgattgtccacgattcggacggcagatcgtgtaattgtacttgatgaaggtcgggtgattcaagagggcgggtaccagcagttatctactgatccggtagggacgttcagcaaacttttgaacatgcaagcaggtgttgtggggcagtaagtcggttatgacataacgtaaagaggcgcgccacgatgggcgcgcctttcatgtaagtagttagtataatgagcaaggattaatgaacgagggctgttttcgtaggaagcggcagttgaagagcaccaatctgctccaaatgctgtacgatctcttgcacagcttcctcaatggaacattgctctgtatcgatgataaatgaaggagatttgggtacatcatagggggcggaaatgcctgtgaaatgcgggatgtcaccattgcgggcttttttgtatagacccttgggatcacgccgctcacattcttggattgaacagcgcacatagatttcaatgaaatcatctggttcaaataactgtctaaccatctcccgatcctgttcatgaggagagataaaagccgaaagtacaaacaacccggcatctaccattaacttcgatacttcaccaattcgccgcagattttcttgacgatcccctgctgtaaaaccgagatcacggttcagtccatgacgtacattatccccgtccagaacataacagcgtacgccttgatcgtagagatactgctccagggcaaatgcaagggatgactttcctgcacctgataacccggtaaaccatatggcacgactacggtgcccattatgcttctcccggtcttgtctgttgatgctggatgattgccaggttatgttgcgctcttccttcgacatgagtatcccgccttttccctaccatgatatgtataatattttaacatatttacaagattatagcaccttacagatttcttcaaaataagcgtgaatcgacaaaatatcgggtatagatgtagtacatacataagcattatgcatatatccaaggagtattttgaatcaaatgatgcaaaatgctcacatcgcaggaggaacaatgtcatgaacaaaaacatacaaaacatacaagttgggttcaaatgcccggattgccagcaagatatccgagcggaatttatagatgaacaggtcagcacggttcgttgtaaaggttgtgacagagcgtatacacttttgaagccaaccatcggtgatgagattctactggattgggagcaggaggctttgtatcacaagctgagggcagagcggtccgaactggataatcacaatatgtctgccttgattatcaaagttatcgagttgcttacatggcgtgatcggggagatggacagacccgtgccatacagaccgtgagggaatggcttgcttccagtggcaaacctcagaccttacttgaattgttccatcaatctccgccacaacctgaaaataaacgtttcgatcgttaatgatttacatacattagccgttcctgtggcatattacctgaaggtgttcgtgtgtgcaaacgactaaccgaatttttcaggaacaggagcggatagaatgaagcgaatggttctatatatactgttgggactgttatccatcagtatggtaccggcacagactgaagcatcaccggttaccggagcgtatcactttggcttcaaaaaaagtcaaaacggtcaactgccctccattgatcaggaaggctttaaatcaatcttacaacataacgatgccattttcctgggggatacaaaacagaaggaattgtatctcacgtttgataacgggtatgagaatggatttacacctgccatactggatgttttgcgtaccaagaaggtgccagctgctttctttgtgacaggtcattatctgaaagatcagcctgagttggtcaaacgtatggcggctgaaggtcatattgtcggtaatcattcatggagtcatccggacatgacccgcatctccaatgaaaagcttagagaggaacttgagagggtcaagacggaggtcaatcggctgaccggtcaacaagcgacctttttacggccaccgcgtggaatttttaacaatcgtacgcttgcagagagtcatgcccaagggtatgtgaatgtgttctggtctgttgcttataaagattgggatactaatgtgcagcgtggctcacaatatgctcatcaacaggtgttgaaacagctccatccgggcgctgtcattttgcttcattcggtatccaaagataacacggaagctctgggttccattattgatgaggcccgcaagcaaggatacgcattcaaaagtctggatgatctgcggaccaaaagttattgatccattatcataatgagcaatggaccaagtgtaggtcattcaaaagttagcaaaaatattaaagggcatcctgagcgattaagctcggaatgccctttttagttataacggtatatgccagtccaagtattggatgtaaccactacagacccagtagaaaggattggattgggtaatacgatacgatgtaacatgtaatactataaaacagtattatagatgattccaatcgttttcgggccgcaatgactgcatactacacaaccagcagtggttagttcaactcgtgcacccgtatgttcctgcaaagacttctgcaagtcaagcgcatcctcttcagccatggtgtgcacaacaatcagcaggtctggatcgatctgatctttctggctgagcgtattattcagcatttgttccagagctttctcccgtttgccgcgcactttataggcaggtgccatcttgccatctgttacccggatgacaggacgaatcttcaacaggcttccaatcaggttctgcatgcccgaacagcgtccgcctttatgcagatactctagtgtatcgataacaaactccgtgcgtacatttgatttcatcgcctcaatcaggtgtgtaatctgagtcaggttttgccctttatcagcagcatgaacagctttcatcaccatcagtgcaattcctgatgagagattctgtgagtcaatgaccgatattcgaccttccgggaactcggaactcgctagttgtgcattttgataggtagaggaaagttcagaagataagctgatatataaaatctcatccccttgatctatgtaaggttgaaatgccgttatgaaatcagcgggggaaggtgcagccgttttaggaagacgcccatcttggctaacacgttcatatagctgttcaggcttaatctcagcaccgtctttcagtgattcttcaccgaacacgacatataaagggatgataccgatatcgtgctgctggatccattctggagccagatcacttgtgctgtccgcaaaaattttgattcgtgacatgtcaatctcctttgaaaacaatgattttggcaaaaaatatagattatacttatgtgtaaacccattcattttaattataaggaaacatgacgctgatgcaaagcgttacatcagcgtcatgcctaccaaaataagtgcaacgaataacagaatcatgatcccatttaatatggttccgataatggcaaaaactttctttcgattcttgaggacaagaccaataattccgacgatgcctccggccagattgagaatcaggcagaccaggatggctaatgaagccagaaccactgctggatgcaaggcgatctcttctgtctgcaacggggtgagaactccgatggattcgtttacagccatggtggcaataaagaatatcagaatataacccaagattgcaaccaacccaatgacaaagctggcgatcccaggtccggaatgtttcagtggtaccattggttgcctctcatgatctggcgggtatgcttcatacccattgttattgtatggatctgcacggccaggattctgatccgtgttgttataacctgaattataggaatcgcgattatccataatgttgacttgcctcccttaatcatcgtactgagtgttattaacctaatcgatgagtaatgattctccttttaaaatacaacgattacatacatgtttacttttccatacttatcgataaaaatcaaggatttacgccagttttctacgatatttagggtgagataggtttagtaagtataaacagacatatgatctttgaagctctgtcccggctggtaaaggaggagtagattcgctacaataataggagtgaattgtagttgaattaagggagagaacttatatgcaacgaagatggatgatgcttggagctgtaatgaccatgctgtcggtggcgattggtgcgtttggtgctcatatgctcaaggatacgattggaccggcggccatagctacatatgagacaggtgtgcaatatcacatgattcatgcattggctttgctcattattggtttgacggctggtcaacttggagcatcgacaaaactgaagtgggcagcgcgtctgttgtttatcggaattatcgtgttctcgggcagtttgtatgtgcttagtatttctggcatcaagattctgggtgccatcacaccgattggtggggtagccttcattgccggatggttgttattggcattagatgtatggcagcgaggtaaggatcgctcctgatcggtccaaacaaatctcggagggttaaatcctacatgaaccatagaactaaaaagcaacttgcgttagaatgtcccgtcattctaacgcaagttgctttttgttttaatccgatgaagttagttacagaaactcatcgatttcattggttcggaacgtatacacctgtttttcatcgacatggtagatgctcacaatactggtatcacgatcaaaattcagaatacggcaaggaatgctctgatgtttaccgttcttgttattgacaacaatacgggtgagtttattctctttaatgagcgtgtcaatccacgcgtcaaacgagtttccatcggatacattggatgtttgggtggcaggctttttctcactaaccggtttttcttgttgattctgtgttttgactggagcaggtgagacaggtgtctgagctgcagtggacgccttctgtgctgcgttggcttttttgcgttcgttgtgaagtgtgacgaaagagtccttcttggactggagtgtcgcttcaataattttgcctagctctatgccggattgaatccgaaagtccgcaatttgttcttcattgtttatgaactccaacagggactgcagtgccaatgcatttgagcggctcttaataagtatatcgacattaaataaaaagccgatgtcctcttgattggataaggtttctttcattcatcccagccccgttaaaaagtatgtcagctcaaaaaaacgcttcaattcactatatcattaaaaaggaaattatcatagtgctagagacgcagaaatatgccgattcgagatgaatctagtcccggagtgccccttaaattctccccagaatagaacaaataatcttcttttttcatcccctgatcgtcctctttgcctgcgccagtcgtgcgggtctactctataatttatttaatcaggacaggaagcaacagggggaatcgggaatgggcaatgcatatcaggatcgattgagatacgtttataaaattacatcttccagaattagaaaagcggattatgatctgcatcttacttatcaagaagcgacagtaaatggagaagtggcatctattggaaaccatcaggtgtttcgttttatagatcgtattcgaggctacaaggagagggaacaagatctggctagaatcaagctggaaatagagcgattaaaagccttgaaaaccaatgctgaacataaaagaacaatgaagaaattgcatgaagaactgaaaaacctgaaatttgccgatgattacttgctggtggtcattgaaaataataaagactatgatcggctgaattcatcgaaagctttctccatcaacggcaagaaatacaagcggttattggctacgacaggtggagccaaaagttcgacggtcatctatgtgagtgaggatattcatccgctgttggagaaaagattgaataacggcagagatcccaataaagagctggttcctgccaaactggaggcatataaggccttggcttgcagtacaagcacgcctgtgtcacatcccgaacgggtattggttgttcatgattgtataactgaatttggcgcagacataattcagattgatgataccgagacagaataccctcgcattgagagtaggaaaaatgagcctattcagatgaacatgagtgatgggttcggtcttatctctcctgcacttagtgaacgatgggcaaccgagctgggacatgcatatatcccgagtggattttgtattcgtaatagcttctgtaaaggtatggtctttacatttgattatcacgaatttgcagatcgagttgcaggcaagtacatggtggacgatgcctggggtaatcctgtggatattcgagaggtagacctgatcatcacaacgtccatgctcaaactctggagctcatacaacagtatcgacgattacctgttatgttgcggttattatggctacacgttcagcgtaacgaaggttacacccgaagaactggaggatgagcgtcatttaaattaccagtttattcagtcactccaattggatgataacgagattggtgaacttattcgtcccacagtagactcgattaaagatgtactgggtgaagactatcgcaaggcactgttatttctcaaaggaattcacatccatgagaacgattatagaaatagtccagatgattatatcaaagggctgatggtagacccgcgacttatagatgatccttttgtgcgcaacaaaattcataccttaatacgtaaacgaatgaatgaagccaagatcggagttctaagagtgaaaggcaatttcagtattatttctggcgatccctatacattgtgtcagagcatatttggcttacctctaacaggattgctgagctcgggtgagttctactccagatattggaatgagcggcatgtagaccgcgtggcttgcttcagagctccgatgacttgtcataacaatatcaaggtgcttcgttttcgaaatacagatgagatgcagcattggtatcgctatatgaacacggtcacgatcttaaattcatgggatacgacgacgcattccttaaatggtgcagatatggatagtgatcaggtcttaactacagacaaccacacaattcttggggcaattcaggagcttgatgcgattgtatgtgtacagaaaacctcagcccaaaaaattccggatgaaaaggatctgattcaggccaacaaagacagctttggtgatctgatcggttttacaacgaacaaaatcacatcgatgtttgatgtattagccaattgtgaggagcatagtgcagaatatcaggaaatgatgtaccgaattcaatgtggtcagcattatcaacaaaatgccattgaccaggccaaaggtattgaatgtaaaaaaatgccgaagcactggtatgatattcgcgctgcggtaacggacgagtctgccttgaaaatggtagcacacaagaaaccttattttttcatatacaatgacccggaacagaaaaaagaatataccacctatgtagaaaaaacgagtcagaagtgcttgcagttatttggcatgactgtggatgagttgtattcgaagaaggagctatctccggatcaggaacagttcctggcacagtatgaacagagaatgcctgtatccacggcaccatctgtgatgaaccggttatgccatcaagtggaagatgagttcaacaagttaaagctaaaacagtccgagagtccatttgatcatacgatattgatgagtaccaaaaaatactcacaagctcgttataaagagctccaacgaatatatcagatgcataacgaagagctacgtagctatatgactaacttgcgcaagagtaaggtgaaaaaggaagaaagatctgcccgatggcagttgtttgtttcacgtttcaaggagcaggcgctggagatctgcaataacgaagaagatttgtgcaatatgattgtggacatgtgttatcgaaatgcggaaaaatcaaagcaatttgtatgggatgtctccggggatcaaattattcgcaatcttttgcttagcaatgatcacatcattcattatccggttagagaccgggacggcgatattgagtacgcgggaaaaacctttaaaatgacccaaatgcatgtgaaggagtagcgcccttgaaaatcattctgaatgaacgtcatcatgccgagcaagcaattgcacatgggaaaatggataagaagccaaccaaaacgttggcatgtctgatcaaatataaatttgaacaagggaagagcgagcatgaagttcatatgttattagaccaatttatggctcagcactatccagattataatactgttcaatgggatacgtatctaacacgtgtcatcaatcagaccctaagttggataaaaaagagaacagaagaacagaaaagtacaatgattgaaattaataaaatacctataacagttgtcgaactccaaaagatcaaagcgttaaagagcatacgcttagagaaattagcatttgtaatgctggtatatagcaaaatcaacaaccttatcaacgaaaatagtacatattgggttaataacgatttgaaagaagtgtacagtgatagtcaaatggcagttagtaaaaaggatcaagggctgttggtgtataaattgattcaacaaggttatctcataggaagcaagcgagtggattccacaaatgtacaagtgcagtttgcttgcgagaatgataaggttgctttttatttggagcgtttcgatgattttgtgttagagtacctacgatggaaaggcgagaatattaagatctgtaccatctgtggaaaacgtatgttggccaagtccaatcgaatgaaatattgtaaggactgcaagaaagctggatatcatcaatcgggtcgttcttaccttgcatttgtctgaatgagcagtttctgaagcaaatcatgatcgtattgatcatggtttgctttttttattttctggtctgcgcttcattagagaataacctctaagccagtcacaccaagggtttccacgtttgttcaagagcgtgtttagtgatagtcaagggaaaggactcccatgaagggacctttgctgtctacttaccatttaggtagaagggggacgttaattggaaatgaatcctagttgctctgtcaaaagttattttaagcagacacaagtcagggctgctccattactcaaaaaagaaggtgttgtatggttcgatctacgtttagtcaattaagtagcacgagagaaatgattattgacaagttgcttacgtcaaaggatctgatgaaggctgttgcttatgatacagcggactatctagaacaatccattgtagttgatccgaaacaatacatatacaaacggattttcccgcaccggtgcattcccggtgaaaatgaagatgtactgaaaactgtagtttccatctcgcttgagaatattctacctgttcagcatcagtataaagcgggcattctgtgttttaatgtatacactcatcgtcagctatgtcagtccaatagtgagctgttacgtacggattatattatcagtaaaattgatgaacttttcgcaaggaatcaagatttaggcttgggacgattggagttttataagatggatgttctggatataaactctaactactatggggatagcattacctatcgcatgctggattttgcttgatgaatgtacagtacatcaaattaagaacgctggctaacaagcctatcgtatttcaaggtctaaatatttttcccaagtcactggatgcaatcgttgaagaaggatatgagaactttaatgaaaagctaaatctggtcagtcttaggatagaggatatttatccatcgctttcactgaaagagtatgatggtacgttgattgaactactattgtacagcaggaacgaaagcttggttgctacttatctgaatgcctttcattattttcttaacgttgccattcaattcagttattcggattcatgtattatggctggtgacatcagcttgtcctattcggatctggaacatatcgtcaaaattattcagattcaacattgtgtagtgactaagcaggatgatgatttcaatccactcaatgaaagagcaagtgcattaagagaaaagatgcttgcacgaaaacgcagagtgcgtgaattaaaagaaagttcatcgtcggaggacgctttaacttttaccgatttgatatccatcttgagttctaacgccaatggaatcaacattctcaatgtatttgatctgaatttctttcaattcaatgatcagtttaatcgcatgaagctattagatgattatgaagttaacattcaggctttattgcatggggcggattccaaaagtatcaagttaaaacattggatttctccattaaattaaaagcagatttaccaatcaaattaaactatataaaactatcggaggtatttttttatgagcagatatggatcacgtgaaattttggatgtagtattgaaagatgttaagactggggaaccggttgtttatttggaaagtttgacgacatcttcgatggagtttgctggacagaccgtatatgcacgtggtggaaaagggcatccgaagctaattggctgggattctgagaaagatgtaaccatgacaatggaagatgcgttgatctctaaagaatcactcgctgttcttacaggatctaaatttgtaaaaggaaccaaacccgtgcataaaaaagaggttcttgaagtgagtaaaacaggagaaatcaaacttagtcatgccccacttacatccaagttggcgcatttcttcaaaacatcaaacggatcatctatggatgccaaacttactgcctctcctattacaggtactgctgtgacatttacagaatccactctcaatgagggagataaagttattgctgattattactatgcagcgccagatactacgcaaagtatgacggttgcttcggatgtgttcccaggcacgtatcttcttgaaggtacgacgaattggaagaatgaagatggcttcgacgtggaggctgtgtacactattcctaaactgaaagtcatgcctggattctcgattgggatggcatcaacgggcgatccgcaaccatttacatttacttgtgaagtactgaaggatactcattccaaagcgatggttgttatcgacgtactggaagactaaaatttaggtgcaaggatggggctggaccaactattggttcagtccttttctgtgtttatccgaagtagcttgagcattttacagaattatatcacctcgtcatatgcttgaaatgttgcgtgtcttcattcatgatcatgcggctttttctatgtttcgcctgatatcattaataatttgctcaagtacagagccgtaatatcagggagttctcatgttaatcggaccattaaatcaaaatcaggagtgatcatattggctacgacaaaaacaaaaaaattaacggcggcagctttaagtacgctagatgcaaaaaacaatcagcgcaaaacgatttatgtaacagaccaacagtatgaagtccagattcataccttttttcggaaatcgctaattgataatgtgaacaccaattatttatctctaatcgatcaacttagacagaaaacagatgttacggatcaagttatcaaagatacagttgggttgtataacacacttcttctaaaagagttctcagatcttccgattcctagaaagctggatgtggagaaactcatcaaggtaaccaacatgttgctagataacggaattatggaagaggtactaacacagtttccggatctggaacttagaaagcttgaagaacagtttaaggcattgcaagagaaaatggcagtaatggtatctgagttggccttgacacgtgcacagcaatcaacagatgagattatttaacgaaatacatctataaaaggagagtactcatgttagtgtttttgaaagcaaatctggaaaaacacattgtattccttcaccagctcaagctggaagccaaggaaagccgtatacggactcggtttaaaaaactattggttgaacactatcagcattttcatgaagaaatggaagagctgaaagatcaacacatgttaaagaatgaagacggcagttttgtcatgagaaacgacagcatggttccacgagactcactaatacttcaaacagaattgcaggagttactggaagaacaagtgatgatcgagtcaaatgctgaacgtatgccaatgttacaagcgatgtaccgaatcctgcaaagttgttcattgcagttggagggagaaacagcggatgtatacgaccaactgtgtgaacagttcgaacaatacgcacaataggggcaattcattgaattgctcctttttgttataagaggagtgatgcatgaatgcaaaatgaactggatttgaatataaataccaatcaagtaattacggatctgaataaggcccttcgagaactttcaaataaaatgagcaaacttgaggtcaaagtggattttgatcaaagttttgtgcaaggaatgaactcttatgcagagggcatgaacagattgaatcgtaccatggttcagaatcaattgatgatgcaaagttcaatggatgaatataaacgtattcagacgattcaagaacgtcagcgccatatgacggatgctgagacagcagcttatgagaaacaacgcaaatccattaaacgtctggaacaagaactagaaggctatacagtgaccaagagtaaagcaaacaaaaatcaattaggtgaaattaccggttactctaaaacatataaaaatgatgcaggtcaacttcttacagtgaataccaataatgacggtgaagtaagaaattacgataaagtgatggagcgtgtaggtcaacagcaacgtatccttaatcaacaaaaccgtttgaaccagcaacgtgaaatcattctcagtgaagaacaggccacgcgcagagctttggaacagcaaacaagccgaaacaacgagtctaaagatcgagcacatcggcaagcactgcaacagaatgcaaaaatggatacaaacctgcgtaattccattaaggaaacagaagaaagaatcgctcaggcaagtcaaaaatacagcttgaatggaacggtatccaatgggttaagatcactaagcaatgagatgctgacgcttaactcatccatgtctacggttggttataaagcatctgcggagcatttagctagagtcaatgagcagcttaaagcaactacgcgctcatcttctgcagcaggtggagaaatcaaaaccttgggtgaagttatgcagggtgcctcaacgatggctgggggatggatgagaaatgtaacctcattgattcagcccatggatgtcttaaggaaagcagttcaatccatcattcaaatggatagtcagatgaatcagttagaacgaacactaggaaagtcattcaacgaagatcgaatgttggatggtagtatcaatattgctcaatctacgggacgtagcatgtctgaggtgaacgggaatttaatcggctttgccaaccgtggttttgaccaatcagaaacgctaagtttagggaaagctgcaagtgtgcttcaaaatatatctaatttgacgccagaagaatcggttaacactttaactggggcaatgactgcttttaatattgaggctaccaagagtatggggattgcagatcaactaaaacaggttagtgggctctatagtgtatcaagtaaggacttggcattatcgttgtcatcagctggtgcagcagccaaactatttggtgtttcgatggaggaagtgctgggaaatacagcagctattagcagtattactcgagaaagcggagatatagtaggacgaggattgaacactatttattccaaagttgcctcggacgatccgtctaccggagcacttcaagaggtggggatatcgagtgccaataaagatgtgattacggtactcgatgagctggcagggaaatggaatcagctaacaaaagcggagcaacaaaacacggctactaaattgactgcactgaatcagtcaacaatgtttacagccctgatgcagaactggaaaacatctgtgaatgcatcggaagcagcccttcattcgcaaggagcagcaatgaaagataatgagcaatatatgggatcactcggcgcacgaattcagaatatgcagaccgcttgggagtcactcacacttgcactggctaacgcattggtatcagacagcattataactattacttcacttgttacagggttactgaactggatggcacaattgaacggcagtttttatttatttggcgtatttgggatggctataggtttgttaaacgcatctttacgaatattagttatagagattactaagacagtgtttagtattagaggaattcctgcggcagcgattgcagcaagtgcgggtacaaatgcattgagtatgagcatcaccctattaaaaaattcttttaaagctctagtggccagcactggtgtaggacttctgtttgctttaataggtagcggtttagagatgttgatgaaattgttctcaagcagcactcaagccaccgaggatttttctgatcaaacggaagtgctgaaccaaaaggtatacgatctcaatggtttgaaatctttgtcagcagagtacgaaatattaactaaacaaatttcacttagctttgaagagaaaacgcgattagctcaaattgaaagtgaactagcttcaaaatatggtatttatactgaaactgttgatggtcagaccaaatctttaacagctaataatgaagcaattcaaactaagaaaacattgcttgaagatgaaatacgattagaacgagaaaaagctgaattagcttataattcaaacgctactaaaattgaagcggagattactgagaaaaaaaacgaagtattaaatagagacgcacaagttaaggaaaccgaaacaagttatctctggggaaaaaataaaatgagtactcttgcacctgaggactctgaatatgattatcaacaaagaatgttcgaaatgagtgcaaaagattatgaagaagcgcttgcattgcagaaagcatctaacgaaagtttaaaagcattaacagatcaaaaattagcgattataaaaaatgctggagaagcatacatagaagccgaagaacaaaaaaatgttaaaattcagaagaatacacgtgaattcttggagatttatgctcttgctgctacacagagtggacaatctgcagagggtattaaagctaatctgggtcaagtatttacagaaattcagaactcaaatattaagagccctgaaagtgcattgaagtttttgaacacacttccaggtgtagggaaacttactgccgatgcttttaaagaagtaagtaacacactcatgcagatggactttagttcaacagttaattcaacagaaaaattaaaagatagtgctgaagtattgtcagagatggtccaatttgcatccgactcaaaacaggaatttgtcttattgaatcaagcacaatctgaacttgctaataataataagctttcaacagacactatacaaaaaatgaacgagaaatatggagattttattaaggtcaccggacttagcaaagtagccatactagatttcattaaggctgagaaaaataaaaaaattgaatttattgattctgaaataaagatgacaaaaaatgcaattaacgagactcgtaaaagaattaaaattacagagattgagatcaaagcttatgaacgaaaaagtaaggcagcaaattccgctaaaattgcagaattatcggatcaagttaaagaagggaaaatctcagaagagcaagctgaacaattttatgcagcttatcggcgaaataatgcattatataattctaacgataaattgattgtaaacaattcccttctccgagataatgcagttgaacaggctagtttaaatgatttgctaatccagttgaatgtacttgatagtactagatccgaattaaccgaaacggttaaaaatagcaacaaagcaactaaagattccacatcttcaaatgacaagtctaacgattctttaaaagaaactattgaattattaactgaactacagctgaaccttcaaaaggtggataaatctctacaggatcttcaaaacaaaagaagattgattgaaccaggttcagctgcctatcgcaagtcgattatgaaagaaaacggactgctcactgagaaatcgaaacttctagccgaaggaatcgaagatccaaggaaacttgtttctactaaagtagaaaaggtatataatgcggaaaatcttactagtaatactgggaaatttacatcgtcttacacaggaaagtactccaatcttatcaacaaatatgcgcatgaaaataatcttgatcctaatttgattgctgctatgatccagaaggagagcgggttccgtcctaatgtgaagtccgaagctggtgcagtgggattaatgcaattaatgccaccgactgccaaagggctaggggttaaggactcaagtgatcctgaacaaaatattatgggcggaacaaagtattttgctcaaatgatgaagcaatttgacaataatattgaacatgctctcgctgcttacaacgctggacctaataaggctaaaaaatggatagacgatgataatattattaaaattccatatggtgaaactagtaaatacgttcctgaagttttaagtatttacaattcattaaccaagaagaaatctaatgagtctgcaactgtttctacaaaagatcaggtgtataaaggttctgatgaagaactcaaagaggctgagagtaaggcggtacaggaaaaagaggaagtcgattatcaagtaatagtcaatcagcacaattttattgatgatgttattttagaatcgaacaataaaatcacacaatttcaaaacgacagagaattgtcttccaatcaacaagggcagtttaccagtgacagtgtcgagtggcgcaaagaagaagcgaagcaaagctctcttctccaaagggaacaaaaagaggtggaacagcaatctgataagattgctaagcttctagaaaaaaaaaagataacttctgaagaatatactcaaaaaattgctgagaataattctaaaatatgggctctggaagaagaaattcaaggaaaacgagtcaatgtaattcgttctcaaatggattcgtatggtaaaaagattcaggatgctgattaccagttagacttgagtaatgccaaattgaattctttaactgaagggtcaatcgaatataataaagctttacaagatcagattcctattcttcaacataagaaaagtcttcaacaagctgaactgttgtatttagaaaaacagctgaccagaaaggatctatctcctgccaaaatagcggaattaactgaggaatttaataagttaaatcttgaattgtatggtacagatgaatcccttaagtcaataaatgagcgactcttagctaaaagagaatcagccgcagacaaaattattgaagatttcaaaaaagtcattgagcagcaacgcgactttgctatcgatgccattgatgagcagcggaaagctgaagacgaacgtcataaagagcgaaataaacatctggatgatgagcagaagaagttcgaaacgcacattaatgcacggataaaagcactggatcgtgaaaattcttctgtcgattatgaggaagagttgaccaagaaaaagaacgaacgtcagaaaattgtggacaaacttaacgttttgtctttggataactccatggaggctaaggcaaaacgaaaagatctgacggagcaactctcaaccgtagatgaagaaatcgctaagtacgaacgtgatcgtgaaagagagcttgttaagcagggactacaggaccaacttgatgatcataagaactacacagataagctaaaagaagaagatagcgatcttcatgagacaacgctagctaatctggatgatgagaagaagaaaacagaacgttattacaaggacatccttgaggaccaaaagtatttttatgatttgaagcaaggattgatgagtaatgatgctgcagtcgtcagtgcaaaattaaccgaaataggagacaggtataacgaattatttgctagcattaagcagcatgcctttgaaacctctcaagaaatgcagaacatgacgtacaactttcagcaatcgatggaaggcatagggaaatttaaagcaggagactattcatcatccgattcaggatcacaggggaacaacaatagtggatcatccaatgaatttaaaattcaaggcacgatggaaacaagaaaagcatggacacattatctgagtaataaggatcaggccgaaaaaatccgaaaagaaatggctttgtataattcagactcatataaatatcagcaactggaaaaggatttcaaaaaactacaagaggagaaccagggataccgggataaatataaatttcctgacaatagctttgcggaactggctaagctaaatatcttttcagcaaatactggtggtatgactccgtcgtttgcaggagggaaattcctgcttgcccatgagaaagagttgattctgaatcaatcggatacatccaatcttctgaagattgttgatgttgttcgggggatcacagatcgaatcaaaaccggtcttgatttcagtacatttaaattttctgagcatagagttgccggaaatacggataaccgaatccagattgataaagttgaaattatggctaaagataacgataccggaatgaacttgcttgggaaattcgaagaagcgttgaataacaaattaaagtggagaaccatttagggaagggcagaagtccttcctttttatatttgcagaaaggagtgaagccattgccaggtgttatagattatcttagaaaacctatacagccccaatattttttagcaaaaccgaatcgtgagatcattagcaaattgagtgagatttgtcatgactccatgagtattcgcttaaatgatgttagcgagttatcattctctataccgtaccagctggatattgcccatgtcttgcagagaaacaaaaatgtagatctgatcaaagaacgatatttaataaaaatggtgcaaggaaccaagatagagtggtttacggtaaatagcctaggggatgatctgggtgatgcggacatgttaaacgtccgttgttactctctagccagggaattgtcagacaagcgtatccatagttattttgcagaatcgtatcatgcagaacaagtgttgacggaactgctggccaacacgctttggaacattgattatctggacgccgattttaaattaagttacaggacattcgatttttcatctaacagtgcgcttgaggctgtattctcggtagcagagacatataacgcgattgttcattttaatacagaaaaacgactaatcagtatgaccaagccagaactgactggaataaatcgaggactcaccgtgggttatgggaaattgttaaaaagcatgaatcgcgagacaagtgctgaggaaatggttacgagattatatgccagtggcagagatggtttaggaattcagaaagtgaatcctacaggacagaattatattgagaattttggctactggttgtatccgtttgaacgtgattcttctcgtaaagtcattacctcaagtctatggatgtctgatggactgtgccatgctttacttgattacaataacttggttgagtctaacaaggagaaattcaatcagtatctggatcaactccaacagtatgaaaaggatctgattccattacagattgatctgaacaagttgcaaaacgacgaggctgttttggaggaagtgacactttcccaacagtttgctgataaaatgttttttgaaaaatatactcattcgggcaactcatctcgaacgtttcaacttaactcagattatgcatatgctgtcatgatacgacttgagcctgctgctggagtatccatttcagtgaatggaacatgggtcaatgcagtatctggaaaatggacgatgctaaccagatctaaggggactgattcggttacggtaagtttaaacgggggtgcagcaagttgcttcattcaggtaaacaccataagccttggtgaatacgatacctcttccaatgaagctatcattgtggatcgatatagtttggatcagaaaaagaaccagatctccctgaaagaggtcgaaatttcaaacctgaacagcaagattatagcggttaagcaacaaattacacagctacagaccttattaacggctgagaacaacttttcctcagagcaactacaggagctcaactactttgttattgaacgagaatttaatgaagacaagtacattgatgaaaaggatctgtacgaggcagctctcgaaaaattcagggaactgcaggtacctcaactatctgtggatatagatattgttaactttctggagattgttgaggagcagcttaattgggataaactcaatctgggggattatgtaaacgtgaaatatgaatcagttggtattggtgtgaccgcccgtatcagtgagattcaatataactatgattcatcttccatcagtctaacgttatccaacattaaaaatgtaaatgatgaatctacccgaattgagaagtttctaaatgaaaccaagaatacctcgatcattgttgataccaataagacaaaatggggtcaagctgtcgttgattcatccgatatgagtaagctgttcgaccgattctggaataaggttacgaatgaaattaatatgtccattaacaacacagtggatattaacaacaaggggattaccattactgatccggatgatccattacgttttctacgtttgacaaacggtgcacttggcctgacacgatcaggggggctgagatatgaaacggccattacggcagatggactgattgctgaaatggtgttaggcaagatcattctgggtcagcgggttgtgataggcgatacaacaggtgtgtttaccattgaggggtccagattgatgatcgatgaccgttgtggacgtgaagtcgttaagctcggattgctctcggagcaaccggatcgttttggatttttcctgaacaggtacggttcatctaactgtaatgatacgaccaaagttaatcgcgtttctatgacagcggatgaaggattcattatcgaacgttttcgtaacgggattgcagataaaacattcggtacttcgcttgatggtgatctgtttgtcaaagctggcgtggatgatcaggtctttacaatagataaaaatggtttggctctcgggtccagtgtatgggcgagggctccttttcatgcggattattacggcaatgtttggatgaataaactctatgcggattcagcggagattcaaaactctttgttcaaagatggccagatcgaaggatcatcattaaccttgcgagatggggcaggtgtgatgaaaatgttcccattgaaaggattatgggctggcgcagaagagtttgaagatgctgttgcatccattgccatggacggtactgccaaattcaaaaagctgaagataacggataatcaaaacacgctgttgattgattcggagcaacgtaagatattcatgaatcaatgggacattgttggggcgggagcgatcgatgcagaactgatcgcagcaacgatggttacggcagaggatggtttcataagttcaatcgtttctggcaaagtttcgactttgacgcgcgcagcagtacaaggatggtccaactacatcaagattgaagggaaagagttaacctttctgacgagtgtggttgaggcgggaacgggtacgcataaagcgttatcagatgggcgcaagttatattggcgtaatgccagtcaatctggtgaaatgacaacagatgtaaccagctggccagtgatggtctatggaatgacagacaagaccaaaatgaagctgtattttgaaggagatggacagacagcctatccgattatcagtatgggtgagggagacgcaaggcaatatggcaaaggtctaataaccaaacccaatgggtccctcgaactcttatattcggcacaatccaatggaagaggaagaagtctgaaattcatggatgacaaagtgattatggagtctgaatccggaccagttgaagtaagtggcaaagaaattattttcaaaacagaagccggttcaaccattcatatgaaaaacgatggtgatattgaaatcaaagctaatcgcaatattaaaattaacggccaacgtatagacctgaattaacagtagatctggaaaggaggtgattacgataaccattcgggatgcactatatttttcgtatgcaggccaaaaatctgtggattatggcatcattaacgtcaaccttagcagtggtatgttggaagaaaattttgttccttcccggagtattgtggaagagaaaatcaagggaagggaccaaccttattttatgagaactgaggttgaaccgctgcaattctcggtatcttttgcatttgaagagagttgggattcagacaagatcagggaagtagcgagatggttaacgcagcatgactattatcaggaattaacatttactaccgaggaaggggtgaatcctgaaaggattttttatgcactcgttgtagatgaagcaacacttatacacaatggactgagacaaggttacattacattgacgttcagatgtgattcgccgtatgcctactctccagttatgacaacgcgaacgtatgaatggaaagaccgaatctatgagtggaaaccggcttttcaaacagggataaattccaaatcggtgattgtgaattcagaaggtcatcttaccctaaatacgaaccgacctaaatggagcgattaccccaaatatacaacatggattgaactgaactgaattcggaaaggagagaattatgtcaaccaatacatccaagcttcaattaaaaataccagcgtttacagatgagattgagaacaccattcgagatttgggtgaaaattttcaaaagttggaccagatatccgatgattttgtcacagacatccctattcgcggagactatctgcaaaatgcgacattacgtaatgccaactgcgtatatggcagttattacggttgggtaaacacacgtactggtaaagctgctcctaaatgggagagtgtgcattcttacaaaaatggagattacatcgtgccaacggtggataatggccatgtgtatcaatgcatccagtccggttactccggctatcgggaacctgttttcccaatatcagaagggtctgaatttcaggatattcgggcaacgagtcaatgggcttcaaccaccctgtatcagaaaaatgatatggtgttgcctacaatagataacggcagatactacatatgcatccaggcaggagagtccggtgatcaagagccaacatggactacgattgatggaacaacaacgtatgacaagaatgcagtttggtccacccatcgaatcgcaaaatggaaagaaatcggttcagctgcctggtttcgaccttttgggaagattgagtaggtgtttatatggctaattggctgtcagtaacacatcagaaaggtcattatgaatctcgtccaattcagattcctattgaatcgggaggcatgttaagtcgggtgagttggcttagtgaagctagttcggagagttccagaattaccgtacagacgagacattcaatggatggaatggaatggagttcttgggaaacgtgcattaatgatggaattgtacctggactgaatgaagacacagcggtcgatcagcaccattttatgtatcgtgtcttgtttgatacaaatgacttgagtaaatcacccaaattgaaagaaattactttttcgtttgaaccgattcttgtgctgttcaataaaggagatcaggtctgtaagcctgaaatttggattcacaagcaagggaacggtgactttcaaatcgacaatcaatcccggcatgctgaagagtttcgtttcaagaatctggtgcatgatgaggaagtgtatgtggataacgagagacaacatatagaatcctctcttcccgtaacgtatcgatataaggattttaacgatcaatttctaagtttgtctgtggggaaaaatattttgcgtgttcgtggagatgcacgaatccagttcagatatcaattcaagttgttacagtaggaggttatatgactggagtagcttataacggttcaagtgtaagtcagacaagtaaaagtgggcatgttacatacgacattgaaaattggatagaacctttttgtagagttagggacgaagaaacaggttcatgcttggactggggcggtggaatttggacttcagctggcagtggaagcaccaatgcagtcataacctcatcgggaacagcatccaactccacggtatatgtgaacggacgggtagttacatgtgtgaacgacccttctccagatacatggaccgcaagtcctgctgtaccaacgagtaatggctcaacaagatatattaacatacgaccctccacatcgggcagtggacagggaagagttgcatcagggagtacgaccgtatttgcaggagctaaagccattggcagtgtcaattcaacagttaccacatcattgggaacttctgcccgaatcacgactggaagcagcaatgtatatacaaactgagtattaaacgaaaggaggtgaactattgtcaaatttacatacacatatgcagtataatgatcccctcacaattattgcccgcaagggggatgctgtagatccatttgtggatcggacagattcgttacctgtcattaatagcatgatcactttacttgaaattccttcatctaccgataaggttgttattagtggttttgttgagattgaccaacatgtatacgagaaaaaacagaagttggcagagaatgagtttctcgttcattatggcatgggtaccattcaatttcacccttctcaagaagggagggttcatctatgtcgctataaaggtagaggactcattatgtatcctgcttcacgaatctatgcaatgattacacgtaatccggatgttatcaaaacattgcaagattttatagaagaatcacagcgtaagctggatgagacgcagctggcgatggaacgagtagaagaagtcatccagcaatccatagaccagacagggcaagcccggcatgctacagatcatgccaaccaggcagctgatgaagcgttagaagctgctaatcgagccaaagatgcctataaaacgactcgactcgtgtataaaggtccggtatcggatcttcgtgaactgcgggacacctatccttttcctgagacaggctggacggtccaaacctacaaggatggcaaaagatatcgttatgatggaaacaactggattgaaattgatatatttggccagaatttgcaggtagttaatccgtatagagatggcttaatgagtgtagcggagcatttgaagttaaacgaaattccactggaagtccaagaccgtgtaattgtattctgcaaagagtcttatgtctttcaggaagtcataggggttgtagctcctttcccatttcatggagagatcctggatgtgaagggtttttgtggtgtctatggagaaacagaaacagagatcagaattgagaaatccagagatctgatccactgggtggatattatggaatctccattggagtttaatgcactagctcatgttgacaacaaaaaggcaaagtttagtaacaaacaagtttcggcaggggatttgtttcggattcaaattatcaaagcaggacttgatattcaacatcttacaattcaattaaccataagaacataaaaaaaggagattgattattatgacacaaccaattattacatggatggacgcaacacatagcaaggagattgtagcaccgtttgattatggtgttattgatgcagataccaaaagtgaaattcgtatttttaatgtgtggaacaacaaaggtggtgcgacggatgtgtccaaaatggaggattgcacttttacaacgcgggatatggacgggggcactggtgatacggttaaatacgatatcgaagctgttaaaaacaactggtttcatgtgcaagtggactcacttggggagaacgatttggatgaagagagctctcgtgtaggcaaggacttttcgaagcctattggaactacgggcaaaactacggtggatcattcaggaacaccttatgcaacaccgctagtaccgggtgcaaaagagattttgggagtcaacaacaatggaaatcaacaagacgccgcaggtaactatgtaacgctgtctattcaatgcgaagtacccttgaatgctcgtagtggtaaacaagagttcaagaaacgtatctcctatcgttacgtttaagaaaagttaatgatgcagacaggctattatagcctgtctttttatttatctatgaggaggaaaaactgtgattttaggtcagaaacagtactctcgttcacctgtatctcaagcttatatatggattgccgattattatgatggaacgtatctgagtgagtatgatcttcagacacagcatccacaccgcttttatgatatcaacaaagagaagttggtgttattcggattgatgggtcaaggatcccaagtttattacaatgttgccaatggggtttttcacattaatgctgatcgttactccatatcttatgaatgtgaggggcaggagtaccctttaaccgggagaacgtttgtatacaatgacatcattcaattcaaaaatggatcctcagaagcgaatatggctggattttcagggcaagggaattcaggggctttcagaaatacgattgaatgttttaactttggttacaaaaaaacaatgaacctgaatgatgcacaaattaattttcaatgcgtatgttccctgcctctaaaggaatccgtattctttcaaataaaaatttcttctaacctggacttgcctgggcaactcgttattcgtaaaaatgggtttgtcgtagatcgaatcatagcccctctgaaggcaaatcatgcggggatcataaactgggacattcgttgagctggattttgagatgagataggtggtgagaatatggcaattcaagaaattgcactagatatagatctatctgtaggtgtttttaaagatacgatagttgaggatcagaggttgaaaataagagaactgggtcatgatgcggacgggaattcaatctatcctgctactggatattgggagtccaccgcgattcgaattcaggataagatcgcatcatttaaaggtgtggctgcaaaggtagatgttgcggggggcgcagaatacaagatttactggagtacatctgaggatgggtttgagtggggggcgtatgaggaaatctctgctaatagcgctatgtccaaatcgcctgcaaagtatgcgaaggtgaaaatagaaatttttgcagaaaagaaatattcgaacttttacatagacgattttaacaagaaggataaatacagtaattcttttattgaaagtgaatctggttcactaggcttaaagaaactatatcaattgaacatggaacgagccttggatactccaacagggatggtgctacgtcagaaggttgaaaaagcgaaatttcaaaaagtagatagaatcagagtgagtaaggggtgattttatggcagttccagcgactacaggcgtattgagatcgaatataagtgatatggagattggcgactatattgtatggagatatgattcttctggagagcaatttatagatggcactctaggaataaacgaaatacctgtaaatggggtggttggtactacaagtttaaacaactactactggtacgctattaaagtagacaaaggtcttttaatctctgatcgcattagacatcatactgtcacttgggattcaatgaatgcaaataagattattgaaggtttgcctaaaacctttggtggtgtctcaggaattgtccgtagtatatctggtggagtgggatatgcagataaggatggaaaactgagtatgaaggacttaggattgggagcattccctacaattaatgagtgggatgtgtatatcaaaaatggtcgtttgggtggaaaggtaaagcccaatgacgataatgtttggcatcatctaaatgttttttcttggactaaagaatctccagctattggcacatggactacaaatgctggaacatcattaagtgcaactaatacttcaagaattgtacgtggatatgaatcaagatcagacaatcgaggtgtagcttttacaggttcttcggcatcacaaaactatattggttttcgtccagtatttgaatataaagaggtgtagtagatggcagtattaggagatcaattagttgcacccgaatcagggtggagacgctatgatgatacacatgttggcttaaagtttacaggaacttggaccaccccatccccatccaatacagtttattatggtggcagtataagagtaactagccgagctgtcgacaataactatgttacattttcttttttcggaacaaagcttaggattatctctgacttttactcagataggcattctgataactctatcacgatagatggtgtaacagagatgtatagtgcgtttcgtgcagtaggttcccctagccttcagcaatccatagtgtatgaaaagactggattacctcttgcatttcacacggttactattgcaacaggtcataatcggataaatttcactttagatgctatagatattgatgaaacggggtatctgtatggacacgctctaacctcccctgaaacaggatggagaagatttgatgatacacacgatgcttttgcttatcttggagcgaattggattgcttatacaggggcaaatcaaggtatttacaacaatagtcatcactatacatctcaaggaaaaggtgacactgaaattaggtttaaattttacggaaccaaatttagactaatttcaagcataggtccggcttttgcaaatgatatttcagtggtcattaatggagtaactgagaagtttaatccaagaatgccaacgacagcagacgaaagacagaaagtaacctatgaaaaaaccaatctaccattaggtattcatgaagttaatcttatcagcggaacgaacggagattggaggttggatattgatgctgtagatattgatgataacggttatttggtagcacgtgtcggacaacaactgacaacaccagagccagagtggaagaggtatgacacggataactacgcactgtatttgggtacagattggaagacagtaacgaattccacggggcgtgtatttgaaggtggctcagttaggtatagcaatgtaactgggaattatataaaattttcttttacaggagacaagcttagactcattgcagagtatggtagcgcatatgatacaaatgttgaagttagcattgatggagtaataaaatatatcgacctaacaacttcatcttcttctaatcaatatcaacctcaaaggatcgcttttgaacaattaggtttaactgatggggttcatgaggttatagttaaaaaagttagtggcacaggtaattttcatattgatgcaatagacattaatgtaactggacgcatggtaagacttattggaacccaattgactacaccagatgagggttggagaaggtatgatgatagtgtatcttctattaaatatgttggaaaattcactaacggtgttggtgctggtgcatacaatggatactctaattacacttcgacaataggagacaagattgtctttgaatttgaaggaaccaaactaagattaattggagcacgatataccaatcgaagtgatttaatcgaagtttacattgatggaaaattgcatgggactcattcgcaactagggacagaacttgcacaagtactcctagttgatattgtgggattaccgaaatcaagacatcgagtagaaatggtgaataagtccagtggatcaacgactacttttatggctcttgatgccgtagatatagactcagatagtcggttatttcatccagacgaagtgacaagtattactgaacttgaagttggtaagcgtattagatgtaactatgttgtgaatacttctggtgcggcaggagagttcaaaaatataggaaaacaaacatctgacttgatctcaacaacatcttttccaagtgtgcctaatggtgacttctatttcattgttgctgacgaatataatggcaagaaaattttaattgcagacagacctattcaagcggctatcacatgggatgcattaaatagtaatggtcttgtatttggcgttcaaaaggatttaggagagaagaattatatgttcgttgcaagactcctatctggtggatactcggcggcagacaaagacaatgagtgggatcagtacattgtaaattcaacgttaaatggtaatattattgctggagacgatagagtatggaattggagcgcaggatacagtcatacaagcacgacaaatgttattagtacgaacagaattcgcagaggatcaactggagcggcatcgtatggtgtaataaattctgcaactgctggtggatatagaccattagtagaactagaaactttgccaatgtttaaatccttcgtcaaacatgatggagcctataaaaggcttgatactggaactttagaatggaatacaatatctgcaactttaccatcagaagacacttttattaatgacggaatggataatctctctgtattagatagaaaaaacgaagttttcgttcagactttgactgccaatggatcggtaggatcaggcaagatttttaaagaaagtatcgatctgaaaaagtatttcgaaataacaagtgtaagtgtgaagtagggcttagatgctctacttctttttgtttttaaaataatgatttcaattagaaaggagatgaataaagatatgagtatatcatggagatcatttactggcgtatccttgagtaacaatgatttaaccgctacacttcccacgcatttacaatctaccatagcaacaggcaatggagtgtcttcgggtaaatggtactgggaggtgttagttcaaagtgcaggtgcaattgtaggggtgactagcactacagtaggtggacagatatggaatactgcaaatcatagaggttactttaacggtgcggcaaaatggggaggaacttcgggtacttcttatggagccacttttggtctaggagatgttataagcgtacttctggatatggatgctggaacaattgagttttggaagaatggtgtaacgcaaggtatagcattcgataacattaaatcccttggaactgtatatcctttttacggtaacccaacaggaactagtgtaccttcaactgcaaccgctagatttgatagaaaggatttctcatatgtacttccgcaaggatattcgcattatgatataaagcacaaaatcttactttcatcaggcgataaattttattcactattaaacgatggcattcaagaaacaacctccatacctaaaatgactagcaatacaactccagaaggtgaggtgcttgtcagtaacgcacctaatggaagttttactatcggatgggaatcattcgatggaattttaactagtgggtggggaaacaacacccttgttactactatgccaaagtggataggatataaatttacaaaaccaaaagtgatagtaaagtataggctttacgttacaaacacaacttattatccccgaaattatgaatttcaaggaagtaatgatggtgttaactatgatactcttcactcaattgttggtggagctagtggtgtattagattacattattccgaatagaaaatcttatactcattatagactctatataacttcattaagctcaggtgcaactttaccagtcgtaatggagcttcaaatgtttgaaatgaaaccatcttatctagttcaaatggaatccgcaaccgaaaaagattttttgaatcgtggtgcaggagatataaacgacttcaatcaaattttaaaaacaaagaaaaattttaaaaaaggaaatactgtgcttggctcaggcaaaacctttgaacacacaattgatatgtcaaagcgccgagtagataaaattacgcttggctaaatttgagaacacatctatacgatgtgttctatttattttgaaaggagatgtgtaaatggtaacatatacagataatttgattcctattatgacatcaatgactgctccaagtggtagggctttttctagcagttatgctacaacaggcaataatgctgacaaagcattcgataactctgatgtctatggttacttgagtggaaatggtagtgtaggacatattggatatgagttcattagccctgttgtaattggaaagtacgttgttagaagtttatctgcgacttactttcctcacatgccgaagaattggacatttgagggttcaaatgatggtgtcaattgggtagttttggacgcacaagcaaatcaaacttggacaactgtaaatacaaataaagaatatgttgttgatatgggcaaagttaaatcttacaaaatgtatcgtttaaattggactgccaataatggtggatcgcaaactgtaataaatgaattaaaaatgtatggattgatttattccagtaaattctttatttcatctgaagataagacatattcattgtacaaaaagataggtaaacctttggttccgttgatgaatggatatgatagtgaagttggtagtgttattggatcagcaagttattcaacaggttacacttggcaggtttttgacaatgatgatactactgtttatacaactaacttcataccagattcctcaaaaccagtatatataggctacagattcaatgatcctgtatgcgttaagagatattcatttctagctggactgagaacatttaaatttatggcttctaacaatggaacaacttgggatacgctagatacacaaacagcattggtttcaaatacaactacttatcaaacatttgatattaaaaatgagaaattttataattattataaaattgaagcgacattagcaactagcggtaatgcttggataagtattccttctgttcagttttatggattaatgccttctattttattagaatgcccttctagcgagggaagttatattgggaatggtatggacaaaggatttcaaatcgatacagttgaagtgttgaatgttaaacaacatattaaagaaaattcaattccgctaggatcaggcaaactcttcagacaaccaatcgacagggagaagcatagagcaaaaaaaattatattaggctaaatttatgaggaacacatctatatggtgtgttctatttattttaaaaggagatgagttgaatggcaacagtaggagatcaactgctcaatcccgaatctgggtggcaaagagttgatgatgcaaataagagcatcaaatacaatggcaactggctttctgttacgggagatccaaatacgtatgcaggaacagctcattactttactctgagtggagcaacaacaaattcaatcgaattctatttctatggaacaaagttaagaataattgatatgtattggtcaaacagagtgaataacgtaacagtagaattggatggggttatatcttcatacaatccaaataactctacaaacaaatacagggtaattgtattcgaaagactaaacttacaatatggttttcacaaagtaaagctaacaacaacaagtacaagcaataacttctctcttgatgccatagacatcgactctaacggtgaaattgtttcaggtttgaataaattcttgatttcattcgaagataagcactatagcgttacaaataaatacaaagataatgctattcctgcaatgacatctaacactagtccgaacggtattgctgatgcaagttcgttttacacgacattttacccatggaaagcatttgatagaattgttgatcagaacggatgggttactgcaagcggagttttagtaggttggcttagttatgaatttccttctactgtaactataacaggctattctataaaatctggtacaactccagctaatagactcccgaagaattggacttttgagggatgggatggagtaaaatggatcgttcttgattcgagagtaaatcaacccaactttgccgcagaagagtttagattctatggatttaagaataagattgcatacaagaaatatagaattaatgtaactgccaatcaaggcgcaggagattttttatcgattggtgatttaggtatgtatgaactcgataaatacatatcttccgtagacaattcagaaacaagttttcttgaacatgggatgaacaaaggaatgattattgatttggaggatgaattcagcgaaagaaggtcattggttaaagatagtgaaaaaatcggtttaggcaaagtcttcaagcaaaaaatcgacacaagtaaaacaccaatcaagagagcatcgatcacataagtaaatgaaatgaactatctatttataattcagaaaggagttggggtgacaaatggcaactttaggtcaagcactgccttttccagaaaaagattggattagacacgatgataccagcaatattttcaagtattctagtggattcgtttcctctccaaacgctgtatattacaacggaacttctaggctttcatcgtctataaattcaactgtagagtttcaatttgaaggcactaagattagactaattggcaatagtcataatatgggatcatctaatatctctattatgattgacagagttactgaaatttacagccaatataaccaaaattctgtccttcagcaagtattgttatacgaaaaaacattgagcagaggtattcacacagttaaaataacaacaaatgacgcttattacgttctttttgatgcaatagacatttatgacaagaaatactataatacactttttcattttagtgggtcatattactattattcaaattcatggaacaagctatctaacaatacaccaacggagcaagattacattgactatgggatggaggacatctccatcatacctgaatccgcatggtcacaactcactggcgaagtcgaattatgctactacacggatgacctaacaaaaacagaagtatcctttaatatcgaaacagaaccttttactcttgaagaggagtgggcagacaaggatattgaagtactttattatactgatgatccatcgataacagaatcagtggttacaattgaaactgatcccttcaccctagccgaagaatgggaagacaaagagatcaaaatcatcgaatacaccgatgatccgaaccaaactgaatcaacgattacaatcgaaaccgaaccgtttaccctctacgatgagttgggtgatagtgtagacgttttatactacacggacgatccctccaaaacatcagcggaactaaatatcacggctaactactccccattggatgaacttgagggagattttgacgtggtaacgtggacgaatgatgaagaggttgttgccggaacccgggacatgatgctaacgtataacgcgctaccgtttgaacaattaattgtgcaaccaacagacatagcgttatatggagacgtgaaaaaggttgtcgctacgaaagtaacggagaacagtccgaaaggtatattaagaatggctgcttcgttcgattcagggctcacatggaagacataccgtttcaacaagtggttcgatttggatatccaggatactacgctgttcaaaagaaaaggaatgaatctggacacactcaacgccatccctgaaaaggatttaatagctataacacgaatcgcctattacttcgatagcagcaagcattatgaaaacagttattcgctggacgaagtgaagatggtcgttgatgcaccgcgtaatgcagtggagttgagcgatatgtcactgcaactgttaaacaccactgccgcaatcgagctgaccttctctggtaacaaactaacaggtgtgcttgatgatgcagatcagggcaaggtgaagtaccgcgtgttattgaacggtaaaacgtattatccgacggatggcaattttacgcgattagcagcttcaccattcaatattgaactcaatattgacgagagaaatgttaattttggcgtagagaataccttgaaggttgaatttcaggactattggggtgccatagactctagggaaatcaagtttatcggatcgtattcaggattaatgttcatggacgagtcgggagactttctgtcagatacctttggcgctattttgaaacaacttgattatggggtgatcatcgccggacagacgacgttaacgaagaaagtcagaatcaaaaacttgcttggatatgctgtggatcatgtatacctggagatggataagaaattcgaaacggacggtgttgacgtccaattatccagacaggccgacccgtttcttccgatcgattatctgacctatggtctgattcaaccggaggatagcatcgatttttatattcgtatcgcaacagatattcatgccaagccgaacccgaatggtaattttgaaatgaaggtcacagcagaccgtgtatagctctcaatacaatgagacaggaagtgaatgaaattaataacggggagactctattagatagttttatacatattaaaagtccggaaaatcgttttgcagcaaagtatatcctgtacaatcaaatggatgacgacctgtcttcgactctaatagctgctacaagaaaagtgtccgagatcgtatccagtatatccgtacgtgtcagacggtcacaggaattgagcaattcgctatatgtaatgtacaaggcgcaaggagatctgagcgcaaccattcaagcggcatccaaagttgatcttgaaggcatgttgtacgttcgaccacataaccgtgcacacggcaaatatgaattactggaagcaccgcgtgtaactgttaatcttaagcctgttgctgatgcaaccacgcgaagtcaaactcacttgcagacgatcaactttggtgatacacagcgtatgatgatcggcagagacgagatggagcaattcgaatcgtttatacatttcggtgatctggataccagaatacccgatttgttacatttggaagaagctaaattgaggttatattacacaggaaccctggcaccaggagcacacattgagctgcatcagccggatacactgtggcgggagtacgggattacgtatgcgaacagacctcagtccatacagctcttatcgtccagttatgtcattgatacgactgaacgttatgttgagtttgatatgatggcattactccaaatgtggagagaaggtattctttcaaatgttggaatgattattcagtctagcggtaacacgccgatttatttcaacactcgtgagtcttccaaaccacctgttttgcagatcaaatatatcacttctcagatctattccatcggtcgaaccgaaattgaaagtgaagtttttatttatggtgcaggtcgcaaggatattgcttcaacgttagttgtgcacagtgatattgggctggattggctcaaatctcagttgtacgttcaccgctatgaggatcacatgcatcatgatatacctcaagtaatcgcagtcagccgtccggacctggatgtagatctgatagtagctaaacgtatagatgcggaactggattcgaacatttctattgctgaaagtaggacagaagagaaggaaacatgggttgctgtttctaaacccgagcttcattcgcagttcattactgctatacgaacaactaaggatacagacggtaatcttgccgttagaacaggtctggacgacgaaaaaactgtagaaatcacagtgtctcatcctgacttgtcttcagttattacggtagatagacaaatgtctctggtcagtacgttaacgatatcacagctgttcgatgatggacgggatacgagtttaattgtatccatacctgatcttcatgcttcattggaagtctccaattatataaaagcaacttcaacgttggggtctttgctaacggtcatgtacgacggtgattcgactgtgatttcggagattatggttaataagcctgatctgaatagtgttcttcaagtcagagcattagatcatgatgagagggcaggcagtcttgagattccttatctggaagaacagcctgggcaattatatatctccagacctgatttgctttccagcattgaggtcaagtatatggatgttttggatggccacattagtattaaggaaagagaatacttggatggctatcttcaggtacgagagtggaaggatatgcattctacggtagatgtgagacagattgtggatatggctactgaaatgacaatttccaagcctgatctggccgcgtatctcctaccaagagttattgcgaatgaagagttagattcaattgcaagtatccgtaaacgggatgccagtgatttagtgaccacagtgattgtgaagagtccagggaatcaagcgtatttttacattttataaagtgagttaattatcaaagagggcgccggccctctttttttttgcgtttaggctctgcccagctctaagcatctgtattttattgtgtaacagtcgtcttctcgttatgatacaatgtgttcatcacatattaaggaatgaagaccatgcgtcaagaggacagcgtatttgaacagattatgaagcagaagagattgaagcctatcaaacctgaaactaataaacttcaagttaaaccaatacataaaaagaaattagctcatgaacaattaagtgaatcagacgtccagttcaaaaagtcggttgctgaatcaatagatcgaagtgtacttcatagacgtgtactgggaattagaagagagttaacggagataaggcgattaaagaatgatgagaatacgttttaaggtaggtataattcgactcaccttgggtgagtgtggcttttattggcgtttattttctgcgttctaacccctcatatctaatcccatagacccactccttttggcatggtataatcattccataatttagggaacgaggtctacgtatgaagaagttgattttatcgtttttagctttattattgtttgtcgtttcaactacatatgcacccgcacctgcaacagcagctactaagtacgattttaaaaatgtcaattggggcatgacagtcaatcaggttaaaaagaaagaaaaatcaaagatattggaaacagtaaagagtaaagattttacctacgtagtttataaaacaaaaggatttaggaagaatgcgaatctgtattacttgttttacaaaaacaaattagtccgtgcaatgtatgtatttgacccaaacaatactaatggaactacaatgcacttgataggtgaatatttcagtttaaagcgagatctatttgatacatatgacagatctattaacaacagagacattcttgatcgaagcggcaagcgtgtcactatgtatgatggcgaagagaaagatctagctgctggaaagataagctaccaatgctattggatagtagataagaaaaaaacacacattagtctttccctctctatctttggaaactttttaattaatcgagtaatctacagcgataacactctggacttcgagatcgataaagtcatggattctatgtaagtataggttaaatcagtgaaggagctgcctcatttctgaggtggctttttatattccaactaaagcatatttctactatctaagtctgcgaaaagaattaccatcaatatatttgaactgtaagtacctacattttctcaaccacggcaggtgtccacacgacaatccagaatgaggcatacaattatcgtgacctgtggaagaggaggtggatcgggaaattatggtgacgatggagcctattgtagttggagaacatgtattagttggggtagaagtcaagctgcccaaaacaactttgctgacgattaacacatccaaaggatatatcatgtgcggagcactcgacgtgggattacttaatgagaagctcggggatcgcaaaattattgcagctcgggcggttggtgtgcgtacactggagcaattgttgcatgcacctatggagtcggtgacaacagaagccgaggccatgggcattacggttggcatgacgggtgtagaggctttgttgaaaatgatctaagcactaacaaaagggctccctatgggaagcccttatttaacgccgtaatacagagcctggcacatcgtaacttccacctctatacacacgaacgctttctattaaattaagcttcttccttcgcgaacaaggcagccagattttcttggaaaggtgcgcgaacaacacctttttccgtgataatagctgttacatattcgttaggcgttacgtcaaatgctgggttgtatactttaacaccttgcggtgctgtacgtttaccaaatccttcggtcacttcttccgcagcgcgttcttcaatcggaatcaggtccccggatggagtggacaagtcgatagtcgacaatgggctggctacatagaacggaatattgtgagccttggcaagcacggccacactgtaggttccgattttgttagctacatcgccattggcagcaacacgatctgttccgacgataacggcttgaatccagcctttggacatgaccatgcctgccatgttatcacagagcagcgtaacgtcaatgccggcttgctgtaactcaaatgcagtcaggcgtgcaccctgaagtacaggacgagtttcgtctgcaaatactttcaggtgaatgccacgttcctgtgcgagatacattggagcagttgccgtaccatatttcgcagtagccagtccacctgcattacagtgagtgagtacacccataccatcttcgaacaatggcagtgcattctcgccgatcatgcggcagacttcttcgtcttccttctgaattaacagagcttctacttcaagagcatcattgccctcatccaggctcaggccggattcaacgacctcatctgctttttgcatcatgcgatccagtgcccagaaaaggttcaccgctgttggtcgagaagtagccagatgagcacatatggattttacgtgatccagccagccttgaatggtcgttccgtcatatgatttggcacccaataccacaccaaatgcagcagcaataccaatcgctggagcaccgcgtactttcatggagtggatggattcccatacttcctcgggtgtatacagtttcaacatgaggatcgtttcgggcagcagacgctggtcaagcatttcaagtttgtcctttttccagatgagagaggacagaggctgatattcaggggttgtcatgggtggttccctccgttccttatgttaagccttagtagtagtaacagctgtggatacaatatccaatacttcgccgatggtattcaagcgacgattgttcttgatcaacgctttaccaatggacaatgctttacgttgagcatgttcacgttcagttgcatttggaatggtatctatatccgccacgtgagcgagccccacgatacgacgaaccattttggcacctgcaaagccgatcgaatctctgaacaattgttgcacatacagatcctgataccctggcgtttttgccatcggatcaacgaggtcgttaacccagagggcacggaaacgagattcgaattcagtccatacatcacgaaccatattcagtaaaagcgtctcacgctcacgcaaagcagacatatcctgtatccatcctggcagggatgcgtaattcaagagcaggttcgcaaggactgcaccgacatcaaatcccatggggccgtaatatgcaaattcgggatcgatgactttagttgattcaggtgtaacaaaaatactgcctgtatgcagatctccatgaagcaatgcctgcccatgtgttaggaatttttcccgcagcaaggccacttcaaggtgaagcactccatctgtgcgaagggcttcagcctcgtcctcaatggaaacatcataattatttttctcagcgatccggtagggttcatcaaagatcagatcctccgttattttgcattggtccggattaatgaatctgccctgttgttccttcttcaattgctgatccatgcccaagtcggatgtgaagaacagcgttcttgccatgaattccccgatatgctgtgcaaaaagaggataggaaacaccttcgatcaggcctttgcgcatgatcacatgatcactcagatcttccataaccgttaacgcaaggtcatcatcgtaatgatacacttcgggtaccatccctggacacagacggtactcttcctgaagaatctcacgttcaatgcgggcacgtaccagagagagcggccatgattctccaaccactttcgcataaggaagcgcctgtttgataatgatacttttatcggagttctgatccgtgatgtggaataccaaattcagattgccatcgccgatctcgtgacaatccagatttgcatctgccgcaaatggacccggtaatgttttggccagttcaattgcatcctggggggtaaacgggcgatattgggacaaaggtgccacctccatatatatgaagaaacaggaaaacccacttctttgcttggtatatgtcagtatatcggaaataacgcggtttttgaacttttttttgagacaagtcaagtcgatcctgattcgaacttccggttcaagggtaaaaacaaataggccggacggttgagagaaacgccgttaacaagcctctccactacatgtggtgacacattattaactctctgttatgtattgcgggacaacctgcttatcatggcatgacagactaattttaaataaaggatgggattaatatggctacaaaaaacaaaacagatcaagcaaaatcggtggaacaagtacttaatcgtcaggtagctaacctgaacgtattgtatgttaaaatccataactatcactggtacgttaaaggacctaacttcttcacgttgcatgtgaaattcgaagagttctacaacgaagttacagtacaaatggatgaaatcgcagagcgtatccttacgctgaaaggtagcccggcggctacaatgaaagagtatttggagctttcctctatccaggaagcagcaggcggagaagacgcaaaaacaatggtgcaaaaccttatcgaggacttcgctacactttcgaatgaatatcaggaaggtatcgaagttgcagatgcagctgaagatcaaccaacatccgatatgctgacaggctttaaggctgacctggagaaacacatgtggatgcttcgctctttcctgggttaatatagccaagatttcgcctaatacaaatggtctcttacgtaagctttctgagcccggatcatgttgtcagaaacgccctgagcgtctatactgctgacaagaacgataggggaggggaccgcttatgttagaaccaaagataccggctttaaaagaatgggcttctgcaatcaaagcgctggaaacgggtcgccagattatggtgatgcgcaaaggtgggattgtagaggaaacccaacattttgagctgaaaagtccggcgttttacctgtatccgacttatgaacatcagcgtaaagaactgattaagtcctcggatcaatcctatgttgaagaatcactggccgaatgggtgcccgaagcttcgacaatccgtattactgcatatgccgaagtaacgcaggatctggagatacgagatcaggagatgctggatcgacttcttgactttcatatgtggacagcggattttgccgaagaccgtttgaaatggaaacggaaagatccgctccatgtattgattttacgtgtgtaccttttgaaagaaccgatggaaatccccgtactgcctgaatataatggttgccgttcatggatttctattccgaatggtccggtgccgcgcgaaatgacgccggtggtggacgttgcggattttgacgaacaggtacagaagattaacgagatgctcaaattgtaaatggtaacgttatttaacggagggacttgtccataatatggatgagtcctttttttagattagtgtacagcagatgacataaaagcttgaattgctgtgatttttctcactgtgcatttgtgcttaagatgttttctgatttgattcaatttgtcttttactatagaatcagaaagaataaggtttcatgcaatggacaaaggttcttaggaaatgacttgattatcattgagaatcagtttagaattattctaaagtgttcttgctttaagaatcgagtacaggagaaattcaggggaagccctgttcagatataataggcgctttttcgttttcgacaactaacatcaatttaatcaatggagggaaacaatacacatggctacgaatttcgtcattgaaggtctgaaagcgacgatcgaaggtaaggaaatcctgaaaggcatcaacctggaaatgaaaggtggagaaatccacgcaatcatgggaccaaacggaacaggtaaatccactctggcttctgcattgatgggtcaccctaaatatgaagtaacagacggtaaaattacacttgatggtgaagatgtattggatatggctgtagatgagcgcgcacgtgcaggtctcttcctggctatgcaatacccaagtgaaattgcaggtgttacgaactccgacttcttgcgtagtgcaattaacgcacgtcgtggcgaaggtaacgagatctctctgatcaagttcattcgtcaaatggaaggtaaaatgaaagaacttgacatgaaccctgagttcgctcaccgttacctgaatgaaggtttctccggtggtgagaaaaaacgtaacgagattctgcaaatgatgctgcttgatccgaaaatcgtagtacttgatgaaattgactccggtctggacatcgatgctttgaaaatcgtggctgacggtgtgaacgctatgaagagcgaagaccgtggcttcctgatcatcactcactaccaacgtctgttgaactacattacgcctgactatgttcacgtaatgatgcaaggtcgtatcgtgaaatccggcggacctgaattggctcaccgtctggaagcggaagggtatgactgggtaaaggcagagctgggaattacagacgaaactgtaggccaagaagcgtaaagacaaaacggaggaggattaattaatgactacacaaacaattcttccggttgaatctgaagcgcttcgcgccttgtcggaaagcaacaatgaacccggctggttgaccgaacagcggctcgaagctttaaagcttgcgagcgggcttgcgcttcctaaactggaaaaacaaaaaatcgaacgctggaatgtcagcgagtacggaacatataaaacaagtgaagctatttcttctttgacagaagtacctgcttctatcaaagatctggttcaggatcaagctgagggcagtctggttatccagcgcaattccggtacggtatactccaaggtgtctgctgatttggcagcaaaaggagttatcttcacggatctggctacagcggttcgcgaacatggcgatctggtaaaacaatatctgaacacagcagtgaaagcggatgagcattccctcgctgcattacatgcggcactttggaatggcggggtcttcctgtatgttccgaaaaatgtcgaaatcgaagtaccactgcaagcagtgttgcttacggacgacgcatctgcaacgtttgcacctcacgtgcttgtagttgcagaagcaaacagttcagtaacttatgttgataactatgtatctggcgaattgtccgcacctgttttccataatggagttgtggaagtattcgcaaaatccggtgctaaagtacgtttcgcatcggttcatcaactgagtgtgaatgtaactgatgtttcattccgtcgtgcagtgttggagaatgatgcttccatcgagtggattgtaggcgaaatgaacaatggcgacacagcgagcaacacgatgaccgtgctgaaaggcaatggatcaagttctgattccaaagtcatcgctgtaggttccggttcgcagaaaatcaactacaccacagaagctcgtcacttcggtaagaatacgccaagccagatgattacacgtgcagttatgcgtgaagaagcttctgcaatcatcaacggcatcacgaagattgagaaaggcgctaccaaagctgatggacagcagacagagaaagtgttgatgctgagccctaaagcacgtggagacgccaacccaattcttcttattgacgaggatgatgtaacagcaggtcacgcggcttctgttggtcaagtcaatgccgagcagattcattacttgatgtcgcgcggaattaaccgtacggacgccgaacgcctgatcatctatggcttcctggctccggtggtggcggatattcctctggaagcactgcgcacccaattgcagtccctgattgagaagaagctgggacaatgaacccgtccattcgcgagcagttcccgatcctccaccaggaaattaacggacacccgctcgtatatttagatagtgctgcaacttcacagaagcctcatgctgtgatcgaagcagtcaaacattattatgagtatgagaactccaacgtacaccgtggtgttcatacccttggaagccgtgcaacggacgcttacgaaggcgcacgggagaaggtagccaagtttatcaatgcccgcagtacacaggagattatctttactcgcgggacaacgacagccctcaatctggtggcttcatcgtacgcccgcgccaattgcaaagaaggcgatgaaattgttatcacgcaaatggagcaccatagtaatctgattccttggcagcaggttgccaaggagacaggtgcaacattgaaatacattccgcttcagcctgacggtcatattgaattggctgatgttgagaagacgattacgaacaatactaaaattgtagcaatcgcttatgtatccaatgttatgggtctgatccatcctgtgaaacaaattgctgaaattgcacaccgcaatggtgctgtcatcgttgttgatggcgcacaaagcacacctcacatgaaggtggacgttcaggatctggactgtgatttctatgcattatccggtcataaaatgtgcggaccaaccggaatcggtgcactctacggcaaaaaggcgctgctggagtccatggaacccattgagttcggtggtgaaatgattgatgatgtgggtctgtacgaatccaactggaaagagcttccctggaagttcgaaggtggaaccccgattatcgcaggtgcggtagggttgggagctgccattgattttctggagcagattggtatggatgagatcgcacttcatgaaagtgtgctggcagcttatgcaacagaacgactggccgagatcgatgggttaaccatctatggcccagccaagcggcatgtgggtgttgttacctttaatctgggggatgttcatccgcatgatgtggcaaccgtgctggatgcgagtggcgtagccattcgtgccggacaccattgctgtcaaccgctaatgcgctggcttgaagttagctcaacagctcgtgccagcttctatctatacaataacgaacaagatgtagatcggcttgtcagcgccttaatccagacaaaggagtattttggcgatgcaacttgatgatctgtacagacgtgttataatggaccactacaaaaacccgcgtaaccgcggaacatttgataatgacgctgtcacggtgaatttgaacaatccaacgtgcggcgaccggatttcactgcaaattttgctgaaagacggaatcgtccaggaagccaaatatacgggtgaaggttgctccatcagcatgtcctctgcatcgatgatgacagaggccgtcaaaggcaaaacgatggaacaagcactcgatatcgctaaccgtttttcctcactgatgaaaggtgaagaagtcgatttcgacgattatgaagatctcgaagccctatccggtgtgaacaagttccctgcacgcatcaaatgtgccactctggcctggaatgcattacgcaaagggattgacgaagagaacaaagtacaataacgatagggaggtagagcaagatggctaaaaaagcaccagaaatggaagagtacaaatatggttttcgcgacgagcacaaatccatctttcaaaccggtaaaggtctgactgcagaagtggttaccgaaatttccaagattaagaatgaaccggaatggatgttggaattccgtttgaaatccctgaaacaattcgaaaagatgccaatgccaaaatggggcggagatctagacggattggatttcaatgaaattcagtattatgtgcgtgcttcggagaaacaaggtaaaacatgggaggaagttccttccgaaatcaaggaaacctttgataaattgggtatccctgaagcagaacaaaagttccttgcaggtgtatcggctcagtatgagtccgaggttgtataccacaacatgcaaaaggaattggaagaccaaggtgtaatcttcatggatacggatacggctcttagagagcatccggaaatcctgcgtgaatattttgcaacggttattccaccagcagataacaaatttgctgcattgaatagtgcggtatggtccggaggaagctttatctacgtgcctaagggcgttaaatgtgaagtacctctgcaagcctacttccggattaactccgagaatatgggacaattcgagcgtacactcatcattgcggacgaagatagcttcgttcactatgtagagggatgtacagctccaatctacagcacgaactcactgcacagtgcggttgttgagatcatctgtaagaaaaatgctcgtgttcgttacacaacgattcaaaactgggcaccaaatatctacaacctcgttacaaaacgtgcggttgcagaagaaaatgcaacgatggaatgggtcgatggtaacatcggttccaaactgacgatgaaatatccagcggttgtactgaaaggccgtggagctaaaggttccgtactctccatcgctgtagctggtaaaaaccagcatcaggatgcaggtgcgaaaatgatccacttggctccggatacaacatctacgattgtatccaagtccatcagtaaacatggtggtaaagtaacgtaccgtggtttggcttcctttggacgtcaagctgagggcgcgaaatccaacatcaagtgtgacacactcattctcgataatgagtccacatcagatacaattccttacaatgaaatcatgaatgataacatcatgctggagcatgaagctacagtatccaaagtgtctgaggatcaactcttctacctgatgagccgtggtctgactgatgcagaagcaacacagatgattatcatgggcttcattgagccattcacgaaggaattgccaatggaatacgccgttgagatgaatagattgatcaaattcgaaatggagggctccattggttaatccaatgcagcgcctttcgaagccgtaaagctgaagctagttgctgatgttaagcggtagatatcgttttatgtgatcgaataccctctagagcagactttttaaaaagtctctccagggggtatttttattcaaaaaatctggggataacagtgatcagaaggttattctgttatcggagtggcaagcgactctccaattacataaaggagcactcggacgggaacgcagttatcgtatttggggataccaatacacggtacacccgtgctgctgacaatatagagttgctcatgtctgagaatggtttaagcgatccgtggatcgatttgattcgaggtgggagtattcctgctgatggagaagcacttatggatgcaaccaatttaaatggacctaactatgaaattgtcgacaaaattttgtatcgcggaagtaaagcgttgtcccttaatgcacagagctatcggttagaaaatcaaacgtttgttgacccgagtgggaagcaactctccgatcattatccgattacagcggaatttgtatacagcacatcttctcagtaccaactaagttcaacaatcggaggatccggaggaactgggtttaatgatctgaatcagattcccgatgccagacctagctcagtggtgcttaattcaggaaatcgtgtagacggcatttcaacgctgtacagggatggaacgaacctagtacatggtggtcaatccaacattgccacactgaacttggcagacggagagtacttaaccgaggcaacaattggtcaggggacacgtaatggagataaacggatcttttacgtggagttgaccactaatcttggaaataaagttgaaggcggacaaaagacctcggatcaaatcaaacttgaggcaccagcggggtggtacattgccggattttatggaagagcaggacaggaattggatcagctaggggtcatatacagacctctgaattagaagtgagcagtggttaaaatgaaataataatatatagatctcatagagtgttcatattagcacagcgccgcttggaatatacgttggagagagaccataaggtttccctaatgatattctgagcggtatttttgtggaataaaataagaccaatagcacaagccatttcatagatttaagcatttaatgatagaaaaggatgtgagtgtatgagcgtgaaccctttcgagggatatcggattacaagttcattcggctatcgaattcatcctattcatggtggacagacatttcaccgcggaattgatctcgtgacagagccttggaatggccccgtctatgcctttatggaaggcagggtacgttttgcttcggaaggagttacaggctccggattcggcggttacgggcttacagttgcccttcaagatcatcgtggctacttgcattgttatgctcacctttcgcggattgccgtaaccgttgggcagcgggtgaagcgaggccagcttatcggtaatcagggaagcacgggtcagagtaccggcccgcatgtacattatgagattcgtaaaacaagtgcgccatcgtacgggtatacagccagcgaagatggtgtgacagaaccgggtgcgtatctacaggccgaatacggaactgcatctcaggaacaggaggctccgccgatgactactgagcagaagaaaatgtttgaagccatgcagaaaacgctggagattcaagggggatggattcagcaacaggagcaactttccaatatggattgtcccgcatgggcgcagcaagcatttgattattatcgaccgtttattatgaatgacaaaggcagttatgaattttggagattacttgttatcatgtaccgcaaggaaaaaggcatccaggttcattcggagtccgacatatagttccctacaaagaacagggagtaacaaaaggctgatccactcaggtagatgcagacagacaaccatttatcgaatgttgcctgttcgcccggttcattccaacggaaacgtcatatgttagggtatacctgatgaagaggaggcaatcacatgagcgaagtaggatatggctgtggtggcaacgtaggcggagtaggcggcgttggcggatacaatatgttcacaaacactggtgcaatcttggtactgttcattctgttggttatcatcacaaaagcattctgtgtgtaattccaacatgatcgaatcggaatagacaaaagggaagccgattacggcttcccttttgtcatatgccaacctatgagttggttatttcagttactatggggttcttcgtatacatgctgtgtacaatgaacagttactgtacataaatctcaacgatagcaatatctctttctttcgctaaatcgataaaggccgtagaggtctgaacgagtggtcggaaataatccgcaggattattcatgacaatgagtcccgtctgacccgtggtgagcagaacccttttaccgataaaattaggcagcatgtgcttgatcagttcctgcgttgcttcagcatttaactgaccaaagctgaggctgtacagttcacacagaacagagatcagttcctgtttggtctggtacacccgattggtcgtcatggcgctgtaaacgtctgctacagcagttatacgggcatatgggtggatctcgtctcctcgcagtccatgaggataaccacttccatcctcgcgctcatgatgttgaagtgcaaccattgccagaatttcatcctgcgtggattctttaatgatatcgtacccatagaatgtgtgtttcttcatttcgtcaaattcttccgtggtcaatttaccaggtttatgtaaaatctcagaaggaatcttggacttgccgatatcatgaagatatcctgctttggctacagttagacattcctcggggttgtaacccatccagccggcgatataaaaagcgagcattccgacttgcaatgaatggttgtacgtataatcgctatccccgtcaagcataagcaacaaggagacaacatctttttgtttttccaactgttctgttagggtaaacaaaatctcatcgacctgtgtctcatcaataaaacccttctccatcgcttgttgaaatagagattcagtacctttgatcgtatcgttaaacaaattagttaacagacgggtttgatcggaaggtaaggtttgtgcatcagagtgtaggtcggatggtgtgtgttctacatctgcgtactcgattccatgttgcaacagtttggataggtcatcttcactgagggtggaacctttcatcagcatgtggagacccgaactgttgtatacatcattttgtaacaggtcacccggtttaagatcagtaacatgcactctcacgtataaaccaccttttctcgactaatatcgacacatataattataataacaagaaaaaaatgggttgacaacgacttatttactattaacccactctgtctaaaaaggtgtaaaggctcattgtttagttctccatggggttccatggtcctaattgatgccccttccattcagatccatcttcccaaatttcctttttccagatcggaacggtctgtttcagtctctctatggcgtaacggcttgcatcataacagtcgttgcgatgaggcgaggaaacagcaatgactacactaatctctgccacatctactttgccgattcggtgactgattgcacataacacaccaggccagcgatcggagatttccacaccaatggctgccatctgagaaagagccatcggcacataggcctcgtattcaagatgaacggtgcgctgttcaccggtcatttcacgagttgtacctacaaaagtaagagctgccccgtgattcggggtaatcactagcgccgttgttgcttccacggacaaagtggattctgtaattagaaataagccatcttcagtccgatgctctggaacggtagagcgaagctgttcatcggatatatccgtaccatcgcctccagagacgggagggatcaacgcaagttcatcttctgagctaagtatagtatcggcaggagcgtactgctggttaactgccaaaaaggatgtccttatctgagaagctgcctctgggtaggccagactcagtttttcttttaaatcggcagcggttggaatatctccaatgtactcaaactccagaagggatgtatttaaacgttctgcaatgcctgcaaatagttgaattgtcaatttcatagatatgactcacctctttttgatctctaaaccctataaatatatcataacgacgcggaaaatgttatgcttatccattagaagaatgaacgtttattgaagagcaggggaggcggtgtgatgagcaccagggagaagcaaaagttaacgattctgcacaccaacgacattcatagccacttcggctccatgagcaccatcgccgctatgatcaatgaggaacgtgaccaaggtggcaacttccttgtattggatatcggcgatcatatggaccggatggccgttgaaacagagggaacactgggtacggctaatgttgatgttattaacctgacgggctacgatgccattacaatcggtaacaacgaaggactaacctttacgccagctcagctctcacagtcctacgctggacttctgtgtcctgtggtatgcagcaatgttgtggagcaagatactggacttgcgccagtgtggatgaaaccttctctaattgtggagaaaggtccatttcgcgttggtctgctgggggcaacggccccttttaccacgttttacgaattgctcgggtgggatgttctggaccctgtggagtcattaagagctcaagtggaagcattacgtgatgaagtagatgtggtggttattctttctcatctggggctttcgacagatcggagactggcggagcagattacgggaattgatgttattctcggtggacatacccatcatgttctcgaagaacccttagtcattggtcagaccgtgctgggtgcagctggaaaatttggccaatggcttgggaaagtggttctggaacgaacaagtgtgggagaacctctccaactggtaagtagcggttgtatggctgccaagagtatattactggatgatcaggtcgcgctggcaatcgctacgaatcgtacggaggctgaaaggacactcaatcagacggcagtgataacggatcgggtgctgcccatcacgtacgaccgggaatccccgtttgctaccttgcttgcacaagctgttcgtcatttcacgggggcacagctgtctctggtgaatgcaggtcagcttctcggagatcttccacaaggtaatattacaaaaggaatgttgcattccctatgtccatctcctataaatgcttgtacaatatgcttgagtggaagtcatattcgtgaagcacttgagcagtccttgttggacgagttttcaggtaagcccattgtgggatttggttttcgtggtcatattctaggcacgttatgtatggacggaatggaagttcaatacaatccagatgcgccagcctatgagaagatccagaccatatccatcaatggggagcctatggacgaacaatgtgagtatatcgttgggacactggacatgtttacgttcaatgtggggtatcctcctcttgctcatggaacccgtacgctctatcatcttccggaattcatacgcgatttgctggaaacggaaataaaacgaccaggggctctggacgacagcctgcgagcccgctggcatcaaagctaaatttaaagtgcttgccttctgctgaagcggcggctagtggtaattacatctacggagcgggagaggataggctgtgcgtttagtacatataaacttattgcagcctggcatgaagctggggaaacgtatttatagtgaagaaggccttgtattacttagtgaggatgtagagctaaccagtcgattgattggacgccttaaggatctcggagtcggttatgtgtatattaaagatgctgcgacagaggacatcattgttcctgaaatgttgcaggaagagacccgaaggaaggcactggtagagatcaagcagcaatttcagagcatgtcgggaatgaaaacgaagaatcggattcctcatttcggtaaagcgcttagtggtgtgatgaatgcgattctggaagacatcggcagtcagaaagaagccatgattatgctgatggacatgaactccagtgattttgacctgtataatcattcgctgaatgtatgtgtgtatacactggttcttggtgtcgcttcgggttacacacgccagcaattaatggagattggtctgggtgccttattgcatgatattggcaagacacagattgcaccagaaattctgcataagccttccagattaagtgacgaggaatttaaaatcattcagcagcacactacatatggacatcgtattctcaaagacgaaccaggtataccgcttctatctgcacattgtgcattgcagcaccatgagcgaattgatggcagcggatatccctttgggctgaaggataaagagattcatgagtatgccaagtggattgctcttgctgattcgtatgatgccatgacaacgaatcgagtctacaagcaagccttgctgccacatcaggccgtagaggtgctgtatacgggctcaggaacactttatgaacaacgaatgctggagagattcagggattgtgtagcgatctaccccgtgggtctatcggtcacgctcagtacgggagaggttggggtggtcgcagcgattcatccacgtgttcctcaacgtccacttatccgggtgctcaaggatgccgacggccagaccttatcttcgccctacgaaattaacctgtctacagcactgtctgtgatgatcacaggtgtagagggtctggaggatacaccttcatctgcccaaagtgaacggttggaaagctgaacaagcttagaaatgattagcgctcatgtcgtaatatcggggccgtttcgtgattcggcccggagttacctgagtgttttttgtcatgtaatggacagggtctacgtatgccggagcattcaaaattgtgctatgataaaagataactccaaaaagagaaacacaaggtatgatgtaaataaaactttttaggttaataaaaggaataaggtgaagaacaatgaccatgctaaactcaggatcggtacaaccgatgcctttatctccgacgaatgatccgtgggatccgattggctctctgcgtacatatggacgccatgtgttgaccagtgtagaaatgactgtgacacatctgtgcaacatgcggtgtgagcactgtgccgtaggagatatgcttacgatgcgtgaagcgccggctcttccattaccgctgatgctgaaacgattggatgaagtggagcatctgcagacgattagtctgacgggtggcgagccaagctttagccagaaaacagtggatgagatgatcatcccgctgctcaaatatgccaaggaacgtggaatccgttcccagatcaattcgaatttaacgctggatatcagccgatatgagcaacttttgccgtatctggacgttatgcatatctcattcaactacctgaatgctgacgatttccatcaagtcggatttgcgaatagtggcagacctgtgaaacgtgaagtcgcggtgaagatgtatgagaaaatgattgaaaattcccgcaaattaagtgaagcaggcatgtttatctctgccgagtccatgattaacttccgtacacacgacaagctggatggtattcatcaattgattcgtgagatgggctgtgttcgtcacgaagtgcatccaatgtataattcgaactttgcttcgtcgttgcccgtgttatcactggaccatatgagagcagcgattcatcgtttgcttgatgcacgtgacaaagatatgtggatgctctttggtactctgccattcttcgcgtgcagtgcagcagagcaggatcgggaactgatcaaccgtttatacagcgaaccaaatgtgacggtacgtaatgatccggacggacgcaaccgcgttaacgtcaacatgttcacgggtaatgtgtatgtgaccgattttgccgatatcccggaatttggtaatattcgtgatcgtaaactggatgatgtgttccatgaatggtcagctgaacatccgttgaatcaaacggtcaattgccattgcgatattgcatcctgttgcggaccaaacctgctagtggcagatatgtattacaaaggtgtggatttcaaatcgagaaaggcaatcacacgttgatattccaggtgtattcctgaaatagatagaaaaggggagtttcaacttggatattcataccgaatttcatcttgggcagctggtatttaatctggtctgtgtctttttgctcgtatttttgaatggcgtatttgtcgcagcggaattttcccttgtgaaagtaaggcagacacgcttaactcaattgcagagtgaaggaaatcgtatggctggttatgcactgaaggtgaatagtaaactggattcctatctatcggcaactcagttcgggattacgctgacatcgcttggactcgggtggctgggagaaccggccatctccgaattgctcgttgagccactcatgtttaaacttggtgtaggagatacagggcttatttcgaccgtgtcggtcattatcggtttttgtatcattacgtttctgcatattgtgctgggtgagcttgcacctaaatcgttggcaattcaaaaaacagacggagtggcattgtttttatctgcgcccttgctgttgttctacaaaatcttcttcccgttcatctggctactgaatgtatcggccaatgcattgctgcgtctagcgggtatcgaacctgccagtgaaggcgaagctcactcggaagatgaacttcgtattctgatgaagcagagcgccaaaagtggtgtcatcgataaagatgagatcaaactgatggacaacatctttgatttctccgatatgctggcacgtgaagtgatgctgccacgtacagacatggattgtttgtacacgcatatgtctttggaagagaacttggagatcattaacgcaaccaaacattcccggtatcccgtagcagtagaagacaaggatgagatcattggatttatacacatcaccgatctgttgctggctaaaccggagcaacaacatgatctggcttcacttgtccgtccaatcttaaacgttcctgaatcgatggaaatcagccatgtgctgcgtctcatgcagaagaaacattcacagatgacgctggttgtggatgaatatggcggcacagctggattgctgaccgcggaagaaattctggaagagatcgttggagacttgtatgacgagtttgaggatgagcgtccgcatatggaacggagtggagattcattttccgttgatggtcgttcgcttattgaagaagttcataagtggactggagccatcattgaggatgaagaagtggatacaatcggcggatggttgtttaaagagcttgggggcaatccaaccaaagggaaaacgaaggagctgaatgggtacgtttttgaagtggaagaatcgactcgcttgcgaattacccgggttcgagtgtacaagaaatctgtccctcaagacatgaattcggaagaaaatccagcagaatagttctctttgcaggagcaagatgagatgaacaagagcgagtcatgacgcagattacggaaatctgcaaggatagagaccttcggaagttacctgaacggggaacgaaccgaaggtctttttttattttaaagaagaatttggagaaattctgcacatagttgaaacgaatttcggattaacttcggggacagcgtcatatggatatagagacgggaagcgggaaagaactcagtgttattcaatatgcaccaacgatgtaataaggaggcgttgttttgtgaaagatccgcagcttcgtgcttacgccccttttgtggggccgtttgatccttgtccgccggtagctattcggacgtatctggtacctccgcaattatttattccatttcagcctatgggctggccgcagtacagcccggcggaagcgttgagattgggaaccttatggcctgcattatacagcccttatacaccagccagatcgaagggaaggaaggtggaagtggatggaacctgaagtgccgaaaccctgtgacactaaatactacgaattgcttgaagaacttcaggcgctggatttcgtgttagtggaactgaatctgtacctggacacccatccgggagacttccaaagcattgagcagtacaacaagttcagccaggagcgaatgcgggtagcccatgaatttcagcagttgtacggaccgttgatgaactttgggcatgccttctccaagtatccgtgggaatggtctcagacgccctggccatggcaagtgtgacacatcagcctcaggcttccttgcaggactttaaggacaggaagcccgagggttagaagaagggctgtattttaataacgtagagggaggcggcttacatgtgggtgtatgagaaaaaactgcaatatcccgtaagggttagtaaatgtgatcctcgtatggcgaaattgctgatggaacaatatggcggtgccgatggggagttggccgctgcccttcgatatctgaatcagcgttatacgattccagacaagattatcggtctgctgacggatattgctacagaggaattttctcatctggagatgattgccaccatgatctacaagttgaccaaggacgcgtcggtggatcaattggaagaagcgggacttgggccgaactatgctcaacgcgattctgccttgttttataccaattcctctggtgtaccctttacagctgcctacattgctgcaaagggtgatccaattgcggatctgtacgaggacattgcagcagaagagaaagcccgggctacatatcaatggttgatcgacctgactgatgacgtggatctgcaggatagtctgaagtttctgcgggaacgggagatcgtgcattccttacgtttccgggaggctgtagagattctgaaagacgatcgggagacaaagaagattttctgaacgtttggtataaaggcagaaatttggcagtccataagggctgcttttttgtatgaaaagatagtattattaaataattaaatttaaaataaaattacatataattatataatttacaaatattgttgtaaaatacactcgcatattatacaatgaaatggtagttaaaaactctatttaggagatgatcattttgagacttagtaaagttcttattttgactgcatgttcctttattctgaccacttcaatttcaagtgcaggcgtgtccgcggcaaatattcaacccaataccagtacaagtgtatcagacgtagtatctgctaggcttgaaagtaaacctttttctgtagtgcattattaccctgtaggttttggagtaccgaaatatcttacggactatattacgccagatggctatgtaggaaccttggtgttggttagttatcatactgtggatggaattgttgctgcaagatacgaagggaccgtttacagataatcagaaatggtagattaaaccttctagtatttaaattcttataacaacgcatttataataaaattgaaagtatcagttccaagataaaataatttggactgctacttttcacttttaaatcatatttattgtgtaataatatgtaagtggtacttttcacaattatagatgtttaatctccaatgataagggagaaaaaggaaaaaataaaaccatccccggtatactactgggatggttttatcggattttgaagtgtatacctaatattcaactaccatggcaacattttgccacccggctccaacggtccagaacagaactttgtcaccacgctgaatctgaccggttgtaaccgctcgatgtaatgcgataaatggactgctggttgaggtgtatccgaactcatctccgatatagacggcaatatcatcaccaatgccgacgttctcggatacagcccgaatgttactaatggatagctgggagaagcaggcggctttgatctcgtctggtctaatctcgttgcgagtcagcaacgtacgaatggactcggaagcagcatccacacagatggaatcatcaaatgggatgaaattcacatgaaaggcacccgcatctacacccgtattgcccagcttcgccaagccttctgcaggaaaaagagaattaccatacacacaggtatccgtctgatagattgaatcaatgaaaccgacagcatgttcatcccgctctacaatgaccgccgctgctgcatcaccgaaattggcgaagtacacgggatcatcgggactggcgtgaggagccacgtaatccgagccgatgattaatgcgcggcgaattcgaggattgcccagcatctgtcggctaacttgttcgaaagcagcagtcatacccgcgcagttggcgttgctgtcaatacagatcgtgtgagaagctccgttaatcaggcgatggatcatcagggaattcgtaggaaagatgtattctggcgtttggcttgcataagcaatcagatcaatatctgcaccggttagtccagttttctccagtaggttactggctgcctcataggccatgcttagtgaattttcgtcatcgttgtcaattttataacgtgtatcacgaccaagtgcctgtaacaatccacgaatatctacacctcttgcatcaaaatgttcaatataaaaatcattgtgcaccttggttgctggatgatagatatcgatatctacaatacgaattccggccatcttcattctcctcttgagcggaagggtgaattcacagcttgtccgcctggtttattaagtggtaacggtagatatgatttcgagattgtccagaccgactgaccgaccgagccgggacaattgcatttttagaatcgcgttgttctcgagggtcaacacaacttttttatattcatcttttttgaacagttgaaggcagccttccagaagaggaacaatctccggagcagtaacattcaactttttgcaatcgatgttcaggtcatactccttggtgttaatagaagcgatcgtatcctgataggccgagatggaacgcaaaccgtcttcttgagagaaagaaccctccagttcaatgtttaacaccttgtttggaacgtcagtcttcagaatgaaatttcccatgcttgatctctctcctttaaatgagttaaggctatcctgttagtggatacacagcccattgggcctctgccgaaagcttctaagatgcgagctggttcgaaggataatttaaccatattataaaggtaggaatgtaaaaagatcaataaaaaagtcgaatcatgtataaaaatgtagaaaagtgaattactgtatttcgtccaaggtggcaagcaaaatattaaatgcacttataatgcgtggagcacccacacatggcgccagatgtagcaatattcccttgagttgattcacagtcattcccacgctcagagccatcgtgtaatgtacgcccaattgttcatactgtccttgggtgatcaacgaagagatgatagcaacttccttccattgatccgtaatcgtggtgcgctgaaaaatatccccgtatgccgtccccataataaattccgacaattcgggaaaatgttctttgatgggggcgagggctcttgcaccgtactccccagaaagtttggcgaaacggtctagtccctgagctacatgttcactcatgatctactcctcctaattcaaagttacggtgcggtgagctgtgggtggaatttcatctcgatcggtcagaagctcaataacagttacctgattcaacgtttgggctgtgttcagcgcagatgagaattcagcaagggtttctgctcgaaacgcaaccgcaccgagagattcggcaaatttggcagcatccataggaacttcatataatgtgccatcaattctgcctgttgttttttccattcctttgagtgccatgtccagttgtttgttgttaacgacaatgaaaatgacgttcagattgttgcataccgcggtattgatctccgtccccagcatcatgaaacatccatccccggtgatacatacaacggtctcttcaggtgaggcggcctttgctcctatcgccataccaatggcgttccccatgcaggcaaagtaagcgtcaaacacaaagctgcctggtttcttgactttatatcgctgaaccgcatgaaatccatggctgccatcatcaacaaacagcttatgatcgtacggaagcagatcgctcattccgtctagtacagaagccagagacagttgggggagatctggtaaagggacagtgtaatccatcggtgccgtggttctcacaggagtagggaggtcttctaatgtgcccagcaaatattgcaggttgtccttcaaatcaccggtgatatgtaaggtttgagcgctcagaatcttgcctacaaatgtaggatcagcgtcaaactgaatgaggtgtgccgggtgatgttcaggcttcagattgcagagggtcatgtcacttagacgtgaaccgagtacgatataaaggtcactttggttcaacatgtcgtctgcatgtgggaaacctccaacaccacaaggtccatggtacaggggatggtcccacgcaatcgctccttttccaccaggagtagtaatgacgggaatgttgaacgattcggccaattgaagcaattcatcatgggctctggcgcgacttacacctttaccagcaataattaaagggcgattggattgttgaatgagaggaaaaatgcgattcagattagatacgctaagcagaggttccggttcgggaatgacaatccggcattgggataacaattcggtctgtacgtcaaaaggaatacagaggtgaacagggcctttattagggccgagtgcaatggaaagggcatgattcaacagtgttccgaagtgatctccacgctcaaccagtttgctgaatagcgtagcaggcctgaacatttcagccagatcagccagataggaagaggaatcctgacactggggtagccccagttcctgaatggattgatgacccgtaataaacagtacaggcagattgttggcctttgcatgggctgctgcagtaagcagattggttccgcctggaccggatgtggcaaaggcaacgccgagtttacctgtctgtaatgcataaccggatgcggcaaaacctgagctggattcatgacggcctggaatgaactctaatccgtaatccaccattttcagtacagcaggacagatggatttaccaataataccaaagacatgagtaacgcctagattacgcagagtttctgccaaatagtccgcaactgttctcatgcgggacacctcgcttcatgaaataggttattagaaccatacgcatattccatttattgaatgcaagttacagtctaaggttgtaagaggaaatattcattgttattaggaagagtatctttttttgtggttttttgtcaacctgtttttgtgagtctgaattcctaattcttaagttggtaacgctttaagtattgctggataaagtaaaaataattggttatatatccctgcaacgaattacccaatcacaacgaagttacaaataatgtaaaaaaatgactgtaaatgatgaatttcagcttctaatagcgacttgaaagctagaggtttattttttttcgtatcaatgcatcgcatttgcaattctttgctttctgctatactggaaaggaattgggaggggatggaatgacagtcatcaagatggctctgattgggctgggtaaaatgggattacatatggttcatctaatcgagaataccaagatggacacggagattgagattgtagcggtgtgtgatgcgaatgaggaaggtttggcgtcttttgcagcttctcatcggggagttaagacgtatacggactaccagcaattgatgaatgaacatcagattgatctgctgtatattgcagttccgccgaaatttcattacccggttgtcatggaagcactggagcgcaaaattcatgtattctgcgagaaaccgcttgccaatagtgtagaagaagccaaaaaaatgctggatgcagcagagcaggcggacgttgttcatgccatccacttctctatgccgcatgaaccttccgtgctgaagttgcaagagatgattgagcagggtactgttgggacaattcgcaaaatagatctcattttgcaattcccgcagtggccacgatcatggcaacagaatgcatggattacgagccgggaacagggtggatttattcttgaagtggggattcactggattcatatgattcaaaaggtgtttggtgccgtccgggtagtaagtactcaggttcaatatcctgagaatggagaatgtgaacttgaagtacaggctgcaatggaactggaagacgggactcgaattcagctgaacggcatctctcaatttgcgggggaagaacgtgtatccatggtggtgtacggtgcgaagggcacgattgccttggaaaattgggaagaattgaagacgggcctggtgggacagccactttctccagtggaagtacttgaatccgccagtgaattgccggttcttaaacatgtcattgcccgtatacaaggcaaaccagctaagatatatgattttaacgatgggtatcaggcacaattggtactggaagcactacggaacacagaacaatcgagataagaaaaggagtgcttaggttttttcatatgaggtgcccggtgcaccttttactgattcagctctccctaacacaaagaagcatcgcagaggctcgggtgagtctgtctgcgatgcttttttcctttgatatatgctcatgatacagctatttagatactcgatcagtatgttgattcagttcaagccagcttgaattgcttaaccagctgatcaagtgcatcggacatttcattcaactgcttggacgtgtcagacatttcctgcagagaagcaagttgttcctccgtcatcgcagatacttcttctgtagctgatgcagtatcttccacaacagccgatacttcattaatggacttcattacagcctcactaccggaagttaactcctcgacaacagcagatacctccagaacttcaccactgaggttatgaatatgctgagtaatggttgaaaaagcattacctgcatcctcaatggtccgcaacccttcattcacatgtagcgtgctctcatcaaccacctgcaccgtactttgaacacctgctaccacggtttccaatatacttgtaatctctttggctgatgttgcactttggtctgcgagattacggatttccgcggcaacgacagcgaagccacgtccattttccccagcgcgggcagcttcaattccggcgttaagtgcaagcagattggtttgtctcgcaatacctgacattgaatctgcaatgttgatcacttgatcagacatcttcgaaatttcattaatggcttcctgtacagagaggaaggattgctcaatggaactcattttacccacagcattatcaatgcgctgttgcccatccacggcaatggattcggtacgaactgcacggcctgccacgtcacttgccgaggaggcgacacgattaagcccgttgagggattgctgcatcgcagctaccatggtttgcgtaagagcaacctgttcatcagcgccttcagcgacacgttccatggctgtggcaacttcttttcctgcaagatggctatcggcaacccctttatccaatcgatccgaagctgtgctcagaatcatggcattgctctgaacgtccagcatcatttgctgcaaaccagtgagcattgtattggctgcctccgcgagttcacgagtttcgtctttcattggcgtagcgattctcagtgtcaggtcaccattggaagaaccaatgtcatttaatgcctgttttacggtacgaatatttctaacaatggcacgggaaaggatcaaagcagtgatgaacgagataatggcgacaacgataagtgccccatacagttccaggttcagtagtgtgtttttttgcttcagtgcttctgtacggttatcggttaacgtatgctcgttggttcgaaacgtatcgagagcagtgcgaatctggtccatgtctcttttacctggatcatctgcgaaaaaatctcgaatggcctgtgtattattggcttggcgaagggcgaccataggttcaccagcgacctggacccagttctccatattagtatgtatgtcttccaaaagtgcaagttgagccggattatccgaaattagagcagcaagttcatctctgagtgtaataagttgctcttttccttgggtgtagggatcgagataattgtcctgaccggtgatgatgtaaccgcgttgacctgtctccatatctaccatgtttctttcgagttcataagtgagggcgtgtaccctcatatcgtgatcgaccagaaaatccagttcccgttggagctgacttgtgctgttctgaatcagcaggatgcaaccagccagtacagccagtacgagtaaatatcctaatccgatcttataaaaaatcttaaaggtctttcgctttttcatgtttgttattcctctctatggggtatatgtagttgtcgaaaaaaacggaaatgtgataattgtaggtctttagattaggtgtctaaagaactatttttagtattatacgtaaaggaacttcttttgtatatagtttgtttaactgcaatataacgtttggttgatgctgtataaggttggggttgatgatgttttacaatcgttggtttacacgctcaaacgttatgtttatcatgggaagggaacgattccaattacatatacaatatcccaatccgaaaggaacattggacatgaataaagagaaggtattgctcaaaccggaagcgatgatttttgacatggatggtacgctgttccagacagagaccctgttgttgccagcttaccagcaactatttgatacattgcgtgccgaagggcattttgaaggagaaactccacccgaggaacggatgctgggaagtttgggcatgttgctcgaagatatatggaaagtggttatgcctgaggcatcggaagcggcacatcgccgtgcagacgaactgttgcttcaactggagattgaggggcttgatcaaggaagttctcaattgtatcctggggtgaaagaaacgctgcaagcattaaaacaacaaggagtgcgtctttttgtcgcaagtaatgggctggaggactatgtgaagggtgtggcgtttgcacacgagattatgcctttctttgaaggggtatacagtgcaggccagtacaagactccttccaaaattaatctggtgcagatcctgcttgagaaacatcgtattcaggacgcatggatggtaggggatcgctcttctgatgtggaagcgggtaaaatgaacggtcaggcggtcatcggctgtgcctatgccgggtttggtcgtgatgaggagcttgcaggctcagatgtgctcatctctgattttacagaactgctgcgtctgtatgatgaagcagagtagcctctacgctgtatacgtttaatgagatttaagattacgaaccgcatgatatgaacctgtagactcaacggaaattcgttgaatacaggtttttttgtttagtcatgcagtcacattctcccctgcagaaagttgatttccctatcccgctttcctccatattccctctatacttcattcaaaagctatagggggtccgattctggtgaaaccatccaaaatacatgcctatatgttcatctttccaagtctttttttaactgttgtattcgggatctatccgctgttatgggcgctgcgttacatgttctatgattatcaaggcatcgggacgcctgtcttcatcgggcttgataattttggacgcattttgcgtgacgggcaattctgggattcagtaggcaacacgggtgtgtatgccctgggcaaactcgtcgttacgattccactgtcgttaactttggcgattattctgaatcgcaaatggagagggcgatccctctttagggcgatctattatcttcccactatttttagcgcttcggtcatggcgattgtattctttattattttcaactcctataacggaatattgaaccaattgctgcttaagtatcatgtgatctccgaacctattagctggctgggggctgaacatgccatgctaacaaccatcatcatcgccatctggggggctgtgggcaactatatgttgttgttcattgcgggtcttcagagcattcctgaagagctttatgaggcggcatccctggatggagcgagtgagtttcagaaactgcggaatgtaacgattccgttgctgggtcctgtcttgcagatgatcatcatgctggcaattaccacggcgctgaaaggttacgagagtattatggtgctgaccgaaggggggccgtatggcaaaacagaggtgatgtatctgtatttgttcaaactgttgtttcccgtgtcggctgacacccaatcactccagcagctcggttatggcagtgcagtcggtttcacaacggctctcatcgtaggggcagtgacgcttatttacttccagatatccaaaaagctcaacgatgtctattaaaaggttgttcaaaaagtccgcttttgattacgaatcatgcttagcagcatcatcagcatcgaatatgaaattcagccgaaatgtccgttgctcacgtagttttccctacgctctgctactccatttctagcttcattccatcttctcggtactgaaaaacagactttttgaacacgtataaaattatcaggaggaaacgatgatgactcaaaacgtgcttgcgccctcagggtctccccaactcattcgctggaccaaacgaacggtactttggttgtttttgatcgcaatcgctctgctgtcgctgttccccatcatacttgtattgctcggttccttcaaaacaaaccaggaattgaccggaggagctaccatctggccgaagatttggcagttctccaactatgctcaggcttggaaaaccgccaatttttcgggttttaccattaacagcgtgtttgttagcatcagtacaacagttggcacactgctggtagcttcgatgtcagcctacgctgtggatcgagtgaatttcaaagggaaaaaggggtacaccctgctcatggcatctactctgtttatttccataggcgcggttgtgctgcgtccgcaatttgacctcatggtcaagctggggctgaataccacgttgtggggcgttattattatactgatcagcgcacacgctgccacatattttattctgattggtttcttcaagagcatcccgcgcgaactggatgaagcggcgatgattgatggctgtaattttttcaccacatactggcgaattattcttccactcctgcgccccggactcgccgttgcaggtctgggtgtatttcagagttcatggaatgaatatattcttccttttgtgttcaccatgagcaatccggacttgcagactttgccggttgggctggctaatctgcgatatggcatcggagctgcggctgaggtccaactgatgatggccggagcctgtctgtccattttgccgctgctcatcgtttatatttttgccaacaaatcattcatgcaggtgaccttgggagctgtgaaaggataggcgtgagcacaatcatggaaacggttttacgggttattccactgtgctatactcattttaattcacagcggacgggccaagccgtgttcaaggagtgagcgccgatgatattcgacttttataaaatgtccctgaaaaaaagaatacagctgctgtacatttttctcgttgtcttatgcatcagtgtgaccgggatatgctcttatctctttgctgcacgaagcattgagcagaatgcacttgaactgaaacaaagcattctgaacaaatcagtgcaggttatggatgaacatctaaggcacattgttgtatcctctttttcttttatgctcaatgaaacgttcacccaggtcatgaaggacgtgggaaaaaataacacatctcattattatcagaatctctcgctgctgcaaacatcgtttgctcaattgaagctcgtagagccactgattgatactgcatatctgacaacacccatcggtgattttttctcgaccaaagactttccgaatcgcaataactcattcgacagggaatacggacgctacgtgaagctgcaaggctggaatacgatgtggtttggttcacatcagagtcaattgttccaatcccaaggaaatgtgttatctctgttgctcaaacctattgtgatcgataatcatacctattcgaatgtatatatggtcgtcaatatgaaggaagaggcgatgcgagacattctgacgcaggatctcatgaataaccagattcaactgtttttgttgcacaaaaacggaaatgaagtcattcggcccaggtcccgaaattacgatttcattatggagcctgactttacccaacagtttagccgtggcgatgctggggattttacctacaggaacgatcagggggaggacatgcttgttaactattcggcattgtcgatgaacgaggattgggtcatggtaagtgtacagtccaaggctgacttgttgtcccccctccaaaagatacgctggctgattatcctgatcatgttgttttgcattttgcttgcactcgggttgtccagcctggtggcctccgctctgctgaagccactgaacaaactgcgacgcctgatggttgaggtggagtccaatgacctggatgtgcggtttcgcagcaagtatgacgatgaagtcagcgctgtagggcatcgtttcaatcggatgttggaccagattcagattctgtttgaagaagtacggacaacggagcaagacaaacggcggtttgaagttaaggcgcttcaggcgcaggttgatcctcatttcctctacaatacccttaatacgatgttctggaaaagtgagagcggagagaagaaggatgtaagtgagatgatcgtctccttatccttattattccgtctgggactgaatgatgggaaagacatcaccagtgtggagcaggagatcaaacatgtcgaacaatacatgcagcttcagcaaaaatgttacgaggatctgttcgtttatcggattgaggtgggggacccctcttgttacgctgttgatattttaaaaatattgcttcagcccttggtggagaattccatcctgcatggattcaaggacaaagaagatttgggcgttatcctgatccgcattgatcgtcagggtgacacactacggctggaggtggctgacaatggatgtgggatggatgtagccagtatctatgctgaggatgttcctgacgggggacgcaaaggttatgccctatccaatctccatggcagactaatcctgcactacggggatgtggcctcgattgtgtttcatagcagtacagatgtgggaacaacagttgttatcacgattccgatcacctgaggaggggcagtatgggccaattgacgatgtgtgttatggatgatatccaggcagttgtaaagggcatatcttcaactattccgtgggaagatcatcaggttcggattgtaggcacggcgggcaatggagagcgcggttggtccttgttgctggagcagcaacccgacatcgtgattagtgatatcaggatgcccaagctgagcgggctggagctaatgaagcgggcattggatgccggactgcgagccaaatttattttcatcagtggttattcggatttccaatatgcacaggaggccattaagcttggtgcatccgattatttactcaaaccgtttacccctgaagaaatactcggtgcggtgttgaaggtaagacaggtaattacggaagagcaggcacagtgcaagcagttggaacagttggagcagaaggtggagagcagtagccagtatgagcgtcacagctatctactgggcttgttgcgtcatgaaatcgggggattcctgaatgaaagtcgctggaatgagctgcagattgatctcgattcctccaatcttctcgtcatggtcattgaggtggatggttatacgcgatatggatacacgatgcatctggatgccgaaatcgttccttttgcggtccaaaatattgtgggagaaaccataaaccgttataccaagggcgttgttttacgggaaaaccgataccggcttgcagccatattgaacacaccaagccagatcgacgtctccgagctactggagcaatgccgccaaaatgtggagcgattcagcaaaaaaacagtctcgattggtgtgggtacgattgcccgcagaccacaggaaatttggacgtcctacgcacatgcagatcaggcgatatcctatcgtttttacagtgaaggcaattgcatcctccagtatgctgaactggagaatcaggcctgtgtggctccgatatatcctctggagaaggaaaaagagctcttttatgcactgaaatgtggtaatgagagcacctgtcaccgcatcattgatgaaattctcgaagaatggcaggtctccgaatgttttcccgagccactcacgatgattcgtttgctgtctggacttgcttttgccatctaccgtgccttttgtgatgagattacagcagaggaacgcttgcgtctggaggccgacctgacagtgcttgaggcgatgcgttccttgacgtttgagggctggaggggatatatcaaacattttagcagtatgggttgcgagattatggacaaaaaacgactcaccgatgtcaaacaggcgattagcaaggcgcaggaatatatcagtttgaatcttgcagaaaatctgacgttgcatgcctgtgcccaatccgtacatttaagtccgagttactttgccaatgccttcaaaaaggaaacgggcataacgccgattcaatatattactaagatgaggatagaaaaggcaaaagagttgctggttgcaggtgtacaggtgcaagagatctgccagaggctgggttatgaggacaggccttatttcagcggtttgttcaagaaatattgcggcatgacgccaacctgcttccggcaaatgtatgagaactgaaaacagatacggatcgtcatttttcccaccatgcaaagttagaatgtccctcacctccatgaaagcgtagcgattatcattacgttaacggataactcaaacaggttgtccagacaagcataagggggcatatcaatggttaaaaagtggatggtgactacgctaagtgcattgctggcgctaagtttggcaggttgttctgctgacagtggtacttcggcaaatagcgaatcggggaccagcggggagaatgccggagggaaaaccaaaatcatatattggacaccggaccgccatgatgctgattttatgaaatccaagatcgatgagttcaaccggacgaacaaggacaacattgaagtggagatgaccgtgatgggggacaactatccacaggcggtcgatattgcttttgccagcaagcaggcacccgatgtgctgcaagttaatgattttcagacgtattatcagaaggggtatctcgccccgatcgatggatacatgagtgatgagatgaaggccgtatttaaagacagcttgattgaaaataaaaacacgattgatggaaaaatatattccctccccaatacagggcaggtctggcggcttgtgtataacaaagatattttcaaaaaggcagggatcgagagtccgccaaaaacgttggctgagatggttgcggatgccaaaaaaattaccgaagttggtaaaagtgaaggcatctatggctttgccagcccattcaagagcagcagcggcttctggagagcagccaatacgattgcaggtgcaagcaataatgttggtattgatggttacaactacaagacaggccaatttgattttgggatgtacaaggatatcgcaatggcgcttcgtcagatgaatcaggatggcagcatgttgccaggagttgaaagtctggacatcgatccgctcagagcccagtttgctcaaggcaaaatcggaatgtacattaaccactccggtgaaccaggtgtatataaagatcagtttcctacaaaagaaaattgggcagccgctcctgtaccaactaatgatggaacgatcaagggcgcttcacaagtcatcgggggctcctacatcggcatcaatgcagattctgccaacaaggaagcggcatggaagtttatggagtatgtgtacagcacagatcttcagagtgagtattacgaaaaaggatacggaatctcactgattcctgctgtattaagctctgacaaaaaaccaagcattccgggcattgaaggtttcctgcccaaacgttatgatgccattttcccggcaaatccaagtgtggtaactgagagttcactggaaggcaccaaatggagtgaggctttttcaatctttgtattcacgggtggcgatctcgatgctgtgatcaaggatctggatacaaggtacaaagcagctctggagaaaaccaaagcggcagggctgaccaacataactgctgatccttcgtttgattcttccaaacttcagggtaaattgtccacagaagactaataaacgttcatagcggccgtggtttaactacttcggtcgcttattcacaaggaaaggggaaaagcaaaatgattattaatcatgcgtctatcgatgcacatatcgtgaacgaaacgagttcccgcaagatcttgggtatgggcggtacattaatgatggtggaggttacctttgctaaaggtggtattggagaagttcactcccatgatgcgcacgagcaggtcagttatatcgtcaaaggcagctttgaggttcaggtcggtgaagaaactcgcatcttaaaagcaggtgacagcttttatgccggttttaacgtcccgcatggggttaaggcactggaggactccgtcattctggatgtgtttaccccgttccgtcaggatttccttgaggcgtcccaatgagctatttttacctttcggcaacggacctgcaacgggctgcccaatattatgaaaaacattttcaggaagaagcccgaaattcgctcacgattgccaatcgtgccatcctgaatgaatttatcgttccttataccaacgatctgaatcgctggattccgatggggacacccgtggactggcttcacaacccgaccaatgatctggagttcacatggggcatcaatcgacactggcatatgctcgatctgggcaaggcgtatctgatgaagggcaatccgctatatgtaacagcatttattgaccacttccgtagctggagacagcaaaacccggtacctgtaaatctggtttacgacgaggctgtgttctttcaaaaacccggtccgtggcgcctgctggagacgggactacgtgtgcagtcctggatatcggcatataaatatatggaagcgagttcactgatagacgaaggctttcaggcggagtttcgacaaggtctggacgagcacgccgagtttttgacccgttacctcggcagcacggaaatcaatcatgccattatgcatatgcaagggttgttcatgatcgctacgttctaccaccagcacccgcgaagtccatactggcgtcaagtggcgatggaacgtcttgagctgtgtttgctgcatcagttgggtgaagagggaatacaggttgaactgacaacacattaccacaatgccagcatcgaaatgtttggcaccccttatcggttgggtgagatttcaggacatcctttctcggcatggtatgcccgctgtctacgccaaatggccgcatttactgaggcgctgatccgaccagatcatcagtctaccggtattggtgattcggattgggttggcgatgggcgacaacgactgaccctgcttggcgcgatcctggacgatgatgatttgatggctcgcggaacggatagctcggagtgtctctggttgctgggtgtggagaaatatgagcgatgcctccgactacaggctgcttcttctccggtgttgtcgagccgagcctttccgcagacaggatattatgtcatgagggacaagtatcaatatcttttttttgatgcggctgccatgggcggagcacacggacatgcggatgcgctgaatgtggagtggatgtggaagaaccagcttttcttcacggacaccggacgttatacgtatgaagaagggaaatggcgtcggtatttcaaaagtacgcgggcgcacaataccgtcacggtggatggtctagatcagacaccttatctctccacacagcaatggggtgaaccggaggctcaggccacaacgttacgttgggagagcaatgacagctatcacttcattgatgcttcacaggatggatatacacatttgccagatccagttacacatcgtcggtggatgctggcaggggtggagatccctatactactaattgtggattggctggaggcagaagcagagcatactctggagcaacgttttcacctgcatccgcaagcggatattgcgttgagaatgaatgaagctggagaaatgacggcggatatgagctatgaggcatcttccataacgctgacgatgcaatgggttacggcaggcatcgggaagggagccttcgcgttgacggagcagcccggctgggtatctgaggtgtatggttccaagtcggaaacatcggtcatccagggcaagactgatttctcgggtaaagtgggtattctgacgttgtgcctccccgcggatcatacagaccaggttacacgtgtaaccacatgcctactggaacctgacctgatgagattggcattatcttatgtgcaaggtgaggaaaaagggtatattgtgattgaccacgacacgctgcaatggtcgaaagaacagaaataaaaacagtgaagcaggagcagatgctcgcacttggcgaacatagactcctgctttttcttcactcacttggctttattttttctttttactctgggtgatttttgcgaaacgggcttgggactggctggctttctggccgttccgggaggtctgttgcgatatacccataaggcatactccagcggctgagtgatggctttataatagatatcccgctccccgatgcgagcgaatacttcacgtgcaggtttggggttaacttcaagcaggtagatacgcccgcttctgtcaatcgccaaatccagtgccaactcacataggtccccatacgtatcttccagaaacgaagcaacatcaatgccgaatttctctgcagttgtgttaatttctgcccggaggtcgtcatcttcgatccattgcttcatgagtcggtccatcgctattgcctgaccgccgccatgcagattggaggttacgcttttttctgcacccatgcgtccagcacatccagtaagctcccattgtccttctccgttcttctgaacgagcatgcgataatcatgcacacgtccattcggaagctgaagttgaatgcccttttgtacaagatacttgtctttcatgttccagtgctggagcaacgcgccaagtcgtgataaatgaactttacgtggagtgatgatacgacgcttctgatcccgcccttgaacaagcactgtattagcctcgctactgctgcgttcaatgcgcagaataccacgtccgcctgttccattaatgggtttgagatagaccagagaagaaactttaagcatccggtttacatcggacatatcctgaaatagagcggtttccggcaggtgttcacgaaagttggctttttgcaaaagggtctggtggatggtccatttattgcgcagtggcctgttcagaaagagcagatgcccatatttctcacgaaaagcaagcaattgctggaaccttcggttacgctgaatccggcaacgatcaaagatcaggtccgggaatgatcgccactccctggaccagccttttccttcatgaaaaaccatggcttcaatttgtttgccgccggggtgtacgtcggctggtgtgaatacatagatatcgagtccccgcttgcgcccttcaagaatcattctgcgataaacgcttcgttcttcaagagcgcgatgttcatttaagtacaacgtcataatgcccagaacaggtgaggacacaaacaatcaccttctttttgcagtattcctgtctatcatcgtttggactgacgggcaagataagcgctgtagtgaaatatacgttccaatgaccgccgtctgatctgtggttcatcaaacttcatgggctttgcattggcttcgaagaaccagagttcccccaggtcatcaatgcccagatccatggacatttctccgagcgtgtaacctgatccccgttctacctgtcttgcgatcattaatgaagtggatttcacacgtttcatcagggttgttgacatttcttcgccaaaaagctcggtcagcagcttctcagggtcttctacgctcccgccgcgcggcacatgagttgtaatgctacgggagccagcaagtctcgctcctacaccggttacgctccattggcccttggtgttcttttgtacaagaacacgcaaatcgaaggggcgtttacgagaggatgccagttcaatgccttgttgcatgatatagggcgtatgtccggtttctttgcgaattcgtgcccataacttggcaagtgtagatgctttataggtcgtgcttctacgtgtggtttgtattttgagacgatagggaagccgttctttttcctgaaatttaagcatcatgattcctttaccagctttgccgctctcgggcttaaggtacagataaggatacgcccgtagaacggcacccagagaagaagcacttcgcatccgccgagtataagggatcagttgctgagtcgatttggatttcctgagccattcgaacagatcccatttgttgaaaaagaatgggttatacagttcgattcctgattgcatgcattcgtcaattttacgctgcacggaaggttttccttcgtcttcccggttgggaatacgattgtacagaacatggggaagggggaaaggttgtgaaacccactttccactccccttgttgtacgtatatcctttcacggtggggccactcacgttcagatcccgtacagttacaatgtacaccacgtatcccatgctctcgcctgtctgtaagatatcctgaaaattttgatgatttcccctgaacatacgctgtttatcatgcatggtcaaaacagcaatgacaggtttgaaatcatcatgaagggtcatcaaatctcttccttcttccggaacttgctcaaatacaggcagtgttccaagatgtgctccaccgacgatttgccctccacccggagtgaagggtgacggaaaatggagcgcccgggtttggcgttcgcttcgaacatccatacatgttcctcctgatcaatgcccagatcaaagccaatctcaccaatcagatgctggtgctgggtttcaatcgcctgggccagtgtaatagcgacggatttggcatgctgaagaacttctcccgcacgatcgccgaagttgcgactgagcgcctgctcaggagtcattagggagccgccatttttgatgtgtgttgtgacgctgccacgtcctgcctttttggctccaattccgacaacaacccattgattgttaccatttttgtgcatgtgaaaacggaaatcaattggacattcatcaatctcaattaggcgtattccctgctgaactacatatccgcgtagctgcttaccatgtcttccctgaagcatgcgcatcagactgttgaaggacccaaaacgcaggagtgcattaccgccttttttgcgataacgtgcgaaatatccacgtttgggcgaataagtcaggcggtagatcccgttccccagacttcctgcagtaggcttatagtagacgaactgatggcgttccaacatttccttcatctgttcaacagaaggattggtaatcgattcagggatataccgtcctgctgccggctcgttctccagcaacgtatagatatccgatttgttgaagaagctccagttgaagaacggaatttttcggcgaacaaatcgttcccgcagctggttgattgctggtgagaagtctgaacgacggcttggtaaccggttgtagacaacatcgggcagaggtacggttctgcgggtaaagcttccgttatcattcaggaaaaaacccgatacagtctcgttctgccaattgatatcccgaggagtaaatgcgtaaatgtaggatttacggctgccttcacggagtaactgtttgatgaaaccagtacgggaaccgaatggattcgtgctcgtcgcaggcccatcagagagtacgccgatcagtggacctaactggacctcatcattttgcaaattccggagataaatactgccccgtttgggaacgttcatcatattacggatacctgaagcgagatacagatgtttacctgcttttttgattggtttgatcgttgcaggtacccggtcacgcccgaagcgaaggtgcaccgtttttttgccggacaggttgaggctcttcattaaagcgttggatacataaaccactttatccggttgcttggtgaaatgcagattgcaaaaggtcaaactcatgatttatcctcctatcctgaaaagatccttgggctccatggcaagcgggcgctgcgggcctcagccgccgtgaatcgggatgggtttcaggccagctttgctggatgtattcggcaatttcattggacgaaagacgtccgtgagaacatgttgttgcaacagataacgggcataggcaagcggccgggtataagtcagggtatgcatgcgtcggtcgcccgcttctgcaaatgaggtgcggcctggtttggagttgacttcaattagccagagttggccctctgcatctgctccgaaatcaagccccaattcggctaacctgccgaaacggctttccagcagggtggggataagagtagcagtctgccggatgctcttcagcagagtttccgtgcggttcgttccatatcgctggagcagatatgcgtgggcaggatatgctttacccccaccgtgaagattggacgtgagtgaaccttcgggtccttcccgtaccatacatccggtaagcgtccagcgaccttgcccattcttttgcattagagcccgtatgtcgaatgctcttccatgatggctaagctccagatatggctgcacgatcatcttacgctcagcctgatgtaatgctagccaggaagatacagcctgggtatggttgaatgtaagaaaaaagttttcattgtcctcgttacgcccctccacgacccatgttgatggagtcgctccctgagacaggcgaaaggtattcttgccatgagtcccggataccggtttgaagaacagtcctttgggccaacggtccagccatgtttcccaaggaatatgcgatccgatccgggttgtgggagcaagttgtgacctcaattcaggatttcgggacaacacacgatgtacctcccattttcctggaagggaagcagaccaataacggtgttgatctgtgccgttggttggtatccattccttaagctgttgtctgacgtacctggagatagggcgaagacaacgatccataatgagatcgactgcaggaacaggtaccgaattccacttcccttgatgatagacatatccccattgaagagggagatggactgtatcatttgatatcgggatcacaataatctgaagggcgtatttcatgctccccaaactgagacgacggcagaaaagttcatccgtaaagggaggtgagccttcggttgcacgtaccagaatggccagtgtcttggtctgagatgttggaaacattacgctgcacctctcctctatcagatttgtttcccatagggaataacttttcaaaaacccgccaggtacgtagaatattcgagcatggctttgacggaagggcggatcttgctctcactcagtggtgtattatcattcttggatggtttggagttgacttcgagcagccatacgcgcccagtggtgtccaaggccagatcaataccaagttcaccaaaatgagcagggatggcactctcgatccctttggcgatatccaatgctgcggtgtgcaatcctgcatacgcggaagctttggctgatccagtcaactgtgttttggcaacagcatccttgacggtgctgagacttccaccccgtgccagattggatacgtagtgactcccgcccgcaatccgggcgacgatggaggttacactccatttacctgtacggttcttttgcacgagcgcacggaaatccacgggtctgccactgttgtcaatgagagtcagcccttgttggatctgataacgcgttgttttcattttcccagacatactggcatacagtttatccagagaagtatacgtttgtttccgggtccccccgacgccagtcgccagagtcaggaagcttccgtcaatctgacgtgagacccggatgatccctttgcccaaagaaccgcggacgggcttcagaaatacaaccggatgtcggttgcacatcgtcttgagcatggcggacgtcttgagcaaatgagactcgggaagaactcgtttaagcgttgaaatggacttgagtgcgtcaaacacttcgtttttgtccagaaacttttcattgaaggtttgcgtgccgtagagcgattttacttctttcataaaatgctgtacgctaggtttgttctcaagcttgcgggacgttagccggttattgacgacgtctgctacaggcagaacagtctttttccagccgtcatcatacacccagcctttcatataacccgttaccgctccaatatcctccggtgtgaaaaaggatacataggcgccttgcttacggcaggcgttcaccagttcttgacagaacatcgtgatggagccaaagggccgatcgggctgatcgggataatcctggctaaccagtacactgatgtagggtccaaggcgaagcgtacggctggctgaacgataggataccctcaggaccgaacgtggaacgagaccggtcttgctggcaactgtctgattgatgcgcagcccgtcataccttggtaccggaataacagtgacttcgcggcggaaagagccaaattgcagctgaagcggccttcctgaagggattttaagcgccttaagcaccccttcgcccagcatgatgacgtcgtcctgcaggatgcccgagccggtaacctgaatcgttacttttttagtggacatcacggatctccttccgggcggcaacttgatgtctgatctcgaagttgaacggcatctgaacatggcatgtgcttcatcatatgaggacatataacccttggtgattgacccatatggattaaatgcatttgatttcgaggcaggttatggatggcctgtttcagagcgcccttgtttgacaggagagaaaagcgtgtattaacacggatgaacaaatcaatctgaggaggaataatagtgaacatttatgacaaagccaatgatttggccaaagcactgagagaaagcagcgaggtggaagagattacttccgcgatgaagctgattgaagctgatccggatgcaaaagcaatgctggataacttccgtgatcaacaaatggaattgcaacaacgtatgatgagcggggatatgccagctccggatgagatggagaaaatggagaagctgtttgaagtactgagtttgaatctgaacatccgtcgtttgtttgatgcggagcgtcgcctcagtgtcatcattgaagacgtgaataaaattattgctgacagcctgggtcatctgtacggtggcgctgaagcgtaaaaaggtagttcaaaaagtccacttttgattacgaaggatgcctagcggcatcatcagcatcgaatatgaaattcagccgatataagcgggggcttacgaaggttgtttccttcggaaacattgtggttgctcacgtagttgtcctacgctccgctactccatttctagcttcattccatcttctcggtactgaaaactgatctttttgaacacgtactaaacgcttgtcttgtttttttacctgaacctttcatattagctccttatcgttcatagactagacatatagagtcgatcaagaacgaaggagctgtgaatggtgaagaggttgaaaaaagcaaaacatgtgatctatctgcttattgcgttgtcgatgctggtcattgcactgccgcggatttcctttgctggaggaatggactgggttaatatttttggcatcgtatgggtgctgttctccttattaatcgttggtgcacatctgcattttattctcggtgtggatgaagagaagaagcgtgcactggaagccgttcgccgggcgaagctgcggcagtgggagatgaaactgctggacaagcaggagcggagcgagtctgtataaggtacagtatgagatccaacatggaagaccggaatcccttggtacaaaggggccccggtcttttttggtacatacagaattagaggttaatgggatgattaaattcagatggcgaacttgcctgtgagaatgggtaggggtggggttattttcctgaagccgtgttataatagatacagtatagtacagatgcatcttcgggggtggtacagttggacggacaggaagagaacgtcacgaagcatgaacagttacttcaacatattgaacaactgaaggttggcagcaaaatatcagtacgtggactcgcgcgggagctgggtgtaagtgaagggacagcgtatcgtgcggtgaaagaggcggagaacttcgggctggtcgtgaccaaggaacgaattggaacggttcggatcgagaagagacctcggggcatgtcggaacagttgacctttgctgatgttgtgaccattgtggaaggccatgtgctggggggtaacgaaggtcttgccaaaccgctgcacaagtatgtgattggcgcgatgaaggaacaggcaatggcccgttatattgacgctgggagtctactgattgtaggtaaccgtgaagatgctcactcgcttgccctcgaacagggagcgggcgtgttgattacgggtggttttgggacaagtcgtgaagtaagaattatggctgacgagcttgggctaccaattatttcatccagacatgatacattcacggtagcttcaatgattaaccgtgcgatcttcgaccggctgattaagaaaaaaattatgcttgttgaggatatcattggtcagaaacctcgcttgcaggtgctgaaggtgaccagttcagccgcagattttcatatgttggtttcagagacgggtgaacatcgcttcccggtcgtggatgaatggaaccgggtcatcgggattgtgagtctgaaggatgtcagtgagctgaaagaagatcaaagtattgagaaatgtgtgatacgccgcccgattacggcctcattgcagacatctcttgcttctgctgcccagattatgacctgggaaggcattgattttctgccaattgtggatcggaatcgcaaactgattgcgtccgtcacacgcaaggaagtgcttcaggccatgcgggatgcacagaagcagccacaactgggagagacgtttgatcatctgatctggaacgggtttgccgaggagcgcggtgaacagaacgaattgttatttcacggattcatcattcctcagatggcaacggatctgggtacgatctccgaaggtgttctgttgaatgtgatgacacaggctggccggcgggcagcgtgggatgttacagggaacgaccatgtggtggataatgtaacaacttattttgttcgaccagtacagattgaggatcagatcctggttcgaccgttaattctggaaaccagtcgtcgaacgtgcaaaatggacattgtggttacccgtgaaggcagtgtggtatgcaaagcggtaatgacattgcagtcgattgaccatgcctagcagggtacgttgcctcgggcatagacaacgagagtactccctgatcaagaagctctgccgggttgcgctgtcgcgcggttctggcttcgcttaatgaaggggaagtactctcttctttttgcagacacaatgatatagcttcaacgaatcatgcagattggccggaggttttacctgatccattactggaccgttgttgaagccgcgcataataactgcggttacgtattccagcaaatacattatacgcacccataatcagaaatagcgcttccacaatcacagataaagtggagcccgtgaagacaaacatcaggatcagggcaagaacaacaagcatgccacccatccagatatttgtccacgaacggtacagaccggcgctggcagcatccgagcttctgtgtgaacgaatactgttcaacgctgcaaaaaccatggcaacagcaaagatggcgattagagcatatttgagtacatcaatgaacacaaagacgcagctccttttctggaaagcatttactgcccttattgtaccatggagagatgcagacaagggcagttttttgctgttacgcaggaacgtgcatgcgaatctgtacccaaacttgcagtacgccttccataaccagcatcgttttgacctgaacggtgtactccttttccctgaccgagtacactttctgattcagcatgattcgcgtcattttgctatactcatcgatgttgaatacatctctgccccgaagtacctcaagttcgtctccgagcttctgtaacatcactttcagagaagcctcgtctggccccttatccgattcttctgcacggactttgatttccttgataacggtttggcgtttactgtattttttcagcgttttgatatcctcctcattctgatgcagctgaagctgcagctcctgattgttcagccacaatgcattgtaactcaggtgaaatacgccgttgtagacgacacatccagcgatcattcccagaacaaacacagcggtcattcgcatcagcgggcggtaacgagaaaatggcggaactctcatgaacgctgttcctgtctcatattagctccggcctccgccgcacacccatttcaccagctcggttcccatatgcgcgcccataaaagcagagatcaaatacaggatttgtttgaccgccggagacaggttaccatccaggaaattgctctcgatgacacgcatgggatctattgtgccgccgacagcggctgcgagtgcccatatctttatttttccagaaatatcgagcatcgtctgtgtcggaggctgaagagagatcactgctccaatacctccgatcatcgcgccgcccagcacgattccaaacgcaataaagaaatcaagaatggctttggacaaaaatgtgctcactggcaacacccctttcagacctagcagcacacctcctgtcttcggtctgtcacagggggagcggcttgtacttctattgtatgggcgtgcccccaaacgttatgataaaatagaataataaagtctccttttaagaggttgtcacgaattttaataggtgattccattttttttatttatttaattcatatagtatgagatagatagggtagcagacggatcagaagatcaatgctgcgactatctgcggcgaaaggaagaaaaaaacatgagttcttttgtgcatttgcacgttcatagcgagtacagtttgctggacggcgctgcgcgtattccggatctcgtgaataaggctgcagatctgggaatgacgacacttgcgctgaccgaccatggcgtgatgtatggtgcaattcctttctataaagcctgcgttgaacgaggcatcaagccaattatagggtgcgaggcatacatgacagcagggtcccgcaaagagcggggaagccgcaaggatcaaccgattcatcatttgattttgttagcaaaaaatatgacgggttaccgtaatctgatgaaattgtgctcgattggacatctcgaaggttttcattacaaaccccgtgtagatatggaaagtctggctgcccatcacgagggcattatctgtctaagtgcgtgtcttggtggtgaagtaccacaacatttactgcatggacgagaagaagaggcgagacgtgcggcgttacgctacaaaaatatctttggtgacgacttctatctggaacttcaggatcacgggctgtcggagcaaaaaagggtgaatccgcagttgatcaaactggctgccgagctggagattccgcttgtagccaccaatgatgcacattatctgtccgaagaggacgcggagcttcaggatgtactgatctgtatcggaacaggcaagaccgtggatgatgagaatcggctccgaattggaaccaatcagctctatctgaaaagtgaagaagagatggctcgtttgtttcctcatgtaccggaagctctggcaaacaccgtccgcattgcggattcctgtgagttgaagctggaatttggcaaatcgattttgccggaatacagaccgcttcctgatggactcagcccttcggtgtatctgcgtcagctgtgcgaagaaggaatgaaggagcgttatgcgcagtccacacgttggacagatgcagagcttcgatccgaactcgaacaacgattggcgtatgagctgggtataatcgacagcatgggattctcggattatttcctgattgtttgggattttatcgcctatgcgcatcaacaaggcattgttactggaccgggccggggctcctcggcaggtagtctggtagcgtacactttgcatattaccgatgttgatccgatgaaatacaacctgctcttcgaacggttcctgaatcccgagcggatctccatgccggatattgatattgacttcagcgatgagcggcgggatgaggtcattgattatgtcgcgcataaatatggcaaagcccatgtcgcccagatcattacgtttggaacgatggctgcccgtgcagccgtacgtgatgttgggcgggccctgaatgtgccttatggcgaagtggacaaggctgcaaagctgattccggcgcaacttggtattaacatcgagcgggccatggaagctacacctgagctgaaggcgctgtatgaaaccaagcctaagacacgtgagctgttggatatggcgatgaaggtcgagggcatgccacgtcatgcttcgacccatgctgcgggagtggttatctcccgtgacccgctgaccgatgcggtgccacttcaggagggcagtgaagggacagcgttaacccagtattccatggaaaacctggagtctattgggctgcttaagatggactttcttggtttgcgtaccctctcaatcattgaacggtgtgtacgctggattggggaacatggagaaattccggatttccgccttatccccgatgatgatccgttaacgtacgagatgcttgggcgaggggacacgatgggcatattccaactggaatctgccggggtacgccgtgtgctgaaagagatgaagccaagtggttttgaagatgtaatctctgtacttgccttgtaccgtccgggtccgatggagttcatatccaaatacattcagggcaagcatggacagattgaagtggattacccccatgtggatctggagcctatcctgaaagatacgtacgggatcatcgtgtatcaggaacagatcatgcagatagcctcccggatggcgggtttctcgctgggtgaggcagatttgctccgcagagcggtctccaagaagaaacgggaagtgctggatctggagcgtggacactttgtacaaggcagtctgaaacaagggtatagcgaagaagaggcagacctggtctatgatatgatcgtcaagtttgccaactatggcttcccgcgtgctcatgccgcggcatatggtgtgcttgcgttccagacggcttatctgaaggcgcattatccggttcattttatggcatccatgttaacagccgtaatgggcagtcatcggaaagtggcagagtacgtggtggaatgtcggcgtatggacatggaggtgcttccgccggatgtgaatgagagcggtattctgtttacacctgtatttgtgccgtccggcagcgcaggagccggggatcagagcaatgcatcacagcagactgcgggagcagatgcagagagtaaccccggaagccctgccgaagaacatgccacgaatggtaacgggagctccttcagggaagatcgagttcatgagcatgatgggcattcgggacaaaccgaatatggtgaagcacctctaccggatgatcccggtcctggaccggaagaggacggtggtggatatgagtggcaggcagcgacaaccatgcctgaggcatccgacaaccggaaggaaccgggattggtgacgatttcttcaatggataatggtaatgacgaaggacaagaggcgtcttcttcgcgcgcggaacaagaggagctgtcctctgtggagaagaacgttgcagtgtctaatgataattcggatgaggaaaaattaacgggtgcaatacgatttggtctggccgctgtgaaaaatgttggtacccaggcaatggaaagcattatgatcgtaaggcaggagagaccgttcgacagcttgctcgatttttgtcgtcgtgtggatttgcgtgtatgcaacaaacgtgtgattgaatcgctgatccaggccggagcttttgacacattacctgggcaccgggcccaattgctggcgatgctggatgagactgttgaagcagcgttgaaatggcgcaaggaacgtgaggatctgcagattcaattgttcgactttgttgagacgccaaactgggagattgaatatccggaaattcctccgtattcctcagggcagcaactggagctagagcgagagttgttaggtttgtatctttccgggcatccgctggatgactatgaagatgtgctggaatcgagtggggctgaccggatcatggagctgaccgaggcggcagacgacacgatgaccgtcgccgcgggtatggttgtgtctgtgaagtcgatcacgacgaaacagggcaaggctatggcgttcatggagctggaagaccagattgaacgctgtgaagtggttctctttcccgaggtatggcggcgtagccagcaacatgtcgggaaaggtgaactgctcgtcgtgcgtgccaaagtgcagcagcaggacgaagggtttaagctgctggctgaggaagtggtgccgttgtcaccggcggcactggagcagcagctgcgcagccgtgaccggcgcgtcaagcccggcagcggcagctcttcgcgcccggcgcaggcggcttcgccgcggcgaccagcgggcgcaggagccgaagcgcagcgcagcagcgcaggcggggatgcttccgctgtgcgtagcagcgggagccaaggctcggcagcgacgcgcagcgatgcggcggcttcccggcctggcggtgccgctgaggcggcaggcagcccggagcagagccgtgaaccgcgggctgtggagcagcgggtgttcgtgaagattgccccgcatgcggagaagccggagcttctggcacgtctgaagcagttgcttcaggagcatcccggacctgtggcgacagtgctcttctatgagcaacagcagaagctgcttgcgctgagtgatgcctaccggattaagccatcaccaaccttgttctccgagatggagaaaatgctgggtgaaggcacggtcaaaattaaataagaggctgtcccgtaagtgatagcacttatccatagtatgaaacctgtttggctcaaagctgaacaggttttttttgattattttagtgcgagctcggttccctgacgacagggtttaaacaaacaaattgcagacttgttataggccagctacagaccagagcggaatgtacaatcctgaaacaggtttaggctgcgactggtcttaaccatccgcacattttatgaacattttaacaggttgctgcatacacttgagaacaccgaaggacctcgtggtcctcgggggattgatgcgggaggtcgagatatgtcatatgaaatcgtagaagccatgctggcccggcggggtgtacggattgatgcaatcgcagcaattgtataccgtctgcaaaaagggtaccaccccgaactgaccttggacgactgtgtaaccagcgtgaaatccgttctgcagaaacgagaggtgcaatatacgctctatacgggtattgctctcgacgaacttgcggagaaaaaactcttgccccaaccgttacaggctattatggaagcggatgaatccctgtatggagtggacgagactctggccctcggcattactcatgtgtatggtatgattggtttaaccagctttggttacctggataaagaaaaaataggtgtaattcatgatttgaacgaacacacaacagccattcatgtctttttggatgatctggtcgcaggggtggctgctgcggcttctgcccggattgcacacaaaaatattaaagccaaaaaatacccctcagacctttaaccccctgtattaccatgcttgtctgttatggtcaatctaatggctcatatgaaggtcttcaagggcggctgacgctgccctgataagcttgcggctgcttatggaagaggtatgaacaagaagatttcgtcaaccatatgagttattcgtgggggactaatgtccctcatgatcccaaattctccccaaaggtcccgaaccctttcttgcagaaaaaaagtgaggtatgttatcattagtccaatatacgggctctgaacattagcttagggggcggacaaggcatgtggacggtgatttacattgcaccgacagcaaaggttgcggacaagatcaagaccaagctttcggaagaaggttttctggtacagacccgtcccatcagtttatccaagcagcaatttgagattcgcgtcccttctggggaattggaagaggtccaggaagtgttgaattccattctgcattcctgatttgttcgacatcaacgtgccttggcagatgaagaagtaccatcggtacataagggactaatcgcgtaagcggagagaggaatcgacttgcatgtattgtatgctgctgtccttccttctttttttgttaggacaaggaccgacctggttgctcccggagaccctaccaagatagattcaaacatcggcgcaacaatctttcggtttttgcaggtaacatcaatcgtgctgacagaagccggtgatccttgccctgtaccggcggatttttttgttgtgaatgctggacaaggcccatggcagcgtgtgggtcgtaagcggtttaccgtaacacgcggatgaagctgccacaagcagcgctctgcaggttgcggccatcaaatcaacggctggagaggtgtagttgtgttcaaagatatattccagaagaaacggaagtacgctaccataccttccgagcgtgcacttcccggcgaaggccaggaagtcctagaacgcccaaaacgtgaaatacctgaagggcttatgaacaagtgcagcaaatgcggcaccattcaatatagcaaggaattggagaaaaatctgaaagtatgtcctgcctgcggttaccatatgcgtcttaacgctatggagcgcattgctatggtacttgatgatcaaggatttgttgagtttgatgctgatatgatatcggttgatccacttggctttcctggatatagcaacaaattggaacaacagcgtctgaaatcgggcctgaaggaagcggtaattacaggggaaggaaccattgatggcctgcctgtagttgttgctgtcatgagctttgatttcttcacaggcagcatgggttctgttgtaggggagaaaattacccgtgccattgagcatgccacagagaaacggttaccattgattattttctcaacatcaggtggtgcccggatgcaagagagtattcttagcctcatgcaaatggctaaaacaagcgcagctttatcccgtttggatgaacagggcgggctgtacatttcggtcattacggacccaacgacaggtggagtctcggcaagttttgcgagcttgggcgatattaacattgccgaacctggcgctgtatttggttttgccggcagaatcgttatcgaacagacgatccgtcagaagttacctgatgatttccagacggctgaatttaatatgcaacatggtcagttggacatggttgtgcaccggaaagagcttcgggccactcttggcaagcttctggatatgcatagtgaaaaaggaggggtctaaatggcgggtgagttgccatatgaagcgcctctggttgagatgcgcaaaaagattgatgaactcgtacagtttggacaggaaaaagggatcgacttcacggacgagattgcccgcctggaagaacgttaccatagacttgaagaagagatctacactggcataacagcagctcagaagatgcatctggcccgtcatcagcaacgcccaacggcgctggacctgatccaactgatatttacggacttcattgagctgcacggtgatcgcatgttcggagacgatcttgcggttgttggcggacttgccaagttgaatggaaagacagtaacggtaatcggacaacagcgggggaaagacacgaaggataatatcgcccgctttttcggcagcgctcatccagaaggtttccgaaaaggacttcgtctgatgaaacaagcgaacaaatttggccgtcctattattacgtttattgatactaaaggggcgtatccgggtaatactgcagaagagagaggtcaatcggaagcgattgctcgcaacctgatggaaatggcgaagctatcggttcctgttattgttgtggtcatcggcgaaggtggaagcggcggtgccctcgctatggctgtgggtaatcgtgtgttgatgctggaacatgcgatctattctgcaatctctccgaacggcgctgcttcgattctctggaaggatgcatccaaggcagatcaggcggctgaagcaatgaaaataacagccaaagacctgcttgagatggaagtcattgaagagattgtccctgagccacgcggcggtgctcatcgggattatgaagcgtctgctgctttcatcagtgaagcgttggtccgtcatctcgacgatatgaagggttggagcggggatcaactgaaacaggatcgttatgagaaattccgtaaaattggatcggtcacgtttgaacctcaagcatccattgaagcccctcaagagcttgtaaaagtcgatgttgcgagtaatttgtcgggaaatgctgaataatgtgacgaatttcctatacaaatgagcaaaagtatagtaaatttaatagttggaaaaagaaaaatagataaagagtaatacctttaaaatcggaggaaacccaaaatgcgtaaaacgaaaattgtatgtaccatcggtccatccagtgaatctctggagaacaccaaaaaattgattatggccggtatgaatgtggcccgtctgaacttctcccacggtgatttcgatgagcacggcggacggatcattgcgattcgccaagcatgcgaagagttgaacaaaacagtagcaatcctgctggacaccaaaggaccggaaattcggacaggtaaactcgaagttgaaccgatcgaattggttcaagacgagtacatcactttgacaacagaagaaattctgggcaccaaagaacgtctttccattacgtatacagatcttccgaatgatgttgaaccgggatctacaattctgatcgacgacggtctgatcggactgactgtggtggaagtgcaaggcaccgagatcaaatgccgtatcgttaacggcgggtcgatcaaaagcaaaaaaggtgttaacgttccgggcgttgccatttctctaccgggtatcaccgaaaaagacgctaacgatatcgtatttggtatcgaacaaggtgtcgatttcatcgcggcttcttttgtacgtaaagcaagtgacgtacttgagattcgtgaattgcttgaaaaacacaatgctggacatatccaaatcatctccaaaatcgaaaaccaacaaggtgtcgataacctcgacgaaatccttgaagtgtctgacggcctgatggttgctcgtggagacctgggtgttgagattcctgcggaagaagtaccattggtacaaaaacgcatgatccaaaaatgtaacgttgcaggtaaaccggttatcacagctacacaaatgctggattccatgcagcgtaacccgcgtccaacacgtgcggaagcaagtgacgtggcgaatgcgatcttcgacggtacggacgcaatcatgttgtccggtgagacagctgcgggtaaataccctgttgaatctgttctgaccatgtcccgtattgctgaaaaagcagaatctgctctgccttaccaagagttgtacctgaaacaacgtgttgctcaacaaacaacagttacagaagcaatcagccaatcggttgctcttcaagctcaagatttgaacgcaaaagcgatcattacttcgactgaatcaggacatactgcacgcatgatttccaagtatcgtccagaatctccaatcatcgctgtgacaacggaagacagaacttcccgtcgtttggctctggcttggggtgtaactcctgtcaaaggaagactggttgattccacggatgctttgttcgaaaatgcaattgaaggcggcgtaaaatccggacttgttaaagaaggagacctggttgtgatcacagcaggtgtacctttgggtcgttccggttctaccaacctgattaaagtaagccaaattccaaacaacgcttaatagcgtcttggatggagaagcaacaggaaagaagcaatggggctttattgtcccgttgctttttttccatcttattgacactttacaacgatgtaacacgtatgaatgatagagcgaaggaggccgataacgtgcgagaacagagcaatggtaactggtatgcggcacgtcttcgtgtacgctatcaagaaagtgaccagatgggcgtggtctaccacgcgaactatttgaattggtttgaaatcggtcgaactgagatgattcgccaaatggggtatacatatcgtaaaatggaggaacaggggttactgcttcccgtaaccggactggatgtgaagtatcacaagcctgcccgatatgatgatgagattatcattttcacccgtattgctgcatttagtggtctgcgactgaattatgagtatgacgtaagacgcatgtctgaagaacctgatgagcatatggcgattggagaacgggtatggtcaactgatgaatcactccccggtgaacggctagttacaggttctacccagcatgtatgggtgaatggggactggaagccagttcggctggataaggcagcctctgagttatacagcgcgcttgaaaaggtgtggctttcgggaaaggggtaatacgtcaatgcgaaaatggatgtgggctttactcttaatcattccggtgattgaattatttggttttgttctgatgagtgactggatcggagccggaaagacattgcttctcatgattctcacgtccttgattggtatagcaatgttgcagtttgaagggcgaaaagtacttgtggacgccaaatccgagatggagcgtggcaaggtacctggaagaaaaatggtcgatggtctttttatttttgtcggtggtttcttgcttttgattccaggttttgtaacggatctgatcgggtttacactggtatttccattaacacgtccggtttaccgtctgttcttcctggggtggctggagaaaaaaatgaaaagtggcaaaattacgttttatcgtcgtccgaaatgaaacaccagttgttatgcataatggaaaaggctccgctcagcagatgatttctgttgaacgaagcctttttctatttttcctgcgtgcatataagatgatgcctcatcggacacggccgttgatgatatacgttctaaggtcgcgtagtacgttagcccgattgaacgcatcgagaatcacgagactgacagggccaataatcaagcccagaacaccgaacaacttcaaacccacaaacatgccaaccagcgtggcgagtgggtcgagccctacactgcttgcaagtaccttcggttcaataatctgacgggcaatcagtaagatcagatagataatactaatgccaatacccagatacagatccccattcataaagaggtacgctgcccaaggcaccatgataaggccaacacccagataaggaagcagatcgaccaaaccaatcatcagagcgatggtgaaagctgaattgacttgcaatataagcagtccaatcatgacgaatagtgctgtaatcgagatcatgatcaattgtgctcttgcgtatccgaacagtgccttcttaaggtcagtccagatgtcggatatcggcttgcgaatggaagagggtacccaccccgatacggtgatgttgtgcctggtccagcttttgctaatgaagaatgtagacaacagaacaacgattaataccgcgcccatgttcggcagggaagtcagcagactcagaatcatgttgaaaaatccggtgaccagatctgtcacggctgtacccaccgtttcagttgttttactaatattgctgttgatggtttcctggtagttgggattttccttgtaaaattcattgatctgcgcagtcaaactctgaatggtgtcattctgggtccagcgcacaaacgtgtccttgatctcatcaacatgaagatcaaagcttgtcgtaagtgaaatgacttcttttaccatgcgggtaatcgccgcagacagcaccaccgcaatggctccaaaataaaggatcaatgaaagagtcacagccagccagcgcgggaatcgtgctcgatgctgaagcagtttcactaatggattcatggcataggcgataatccaggcaatcgcaaaagggtacaaaagcgggaacagcaagtatatggcaacggcgatcagaacggccgcaatgataacccataagccacggagcaggcgtttcattattattctatccaagcatcaactctccttatttcaattaagccgacctatgtatgatccatgaagcagtattaaaaatagatggctatcttaattaatatagagcatttacaaggttttgaaacgccgggatcttaccagatcttgttcaaaagcggatttttgaacaagatgtatggggattctttcttttgcctagagtatgccttagtattacagaatatagcaatagaaagttctcatacgacaggattggttaaaaaacattaaatgtcaaccttgtttttgtaaaggctttcaaaaatgctttatcggaccgataaagaagtttgatgtgcgaatgaactctcatcatgttcacataaacgacaaaatccagtatgatgttataagtaaataccgattgacagataggaaaaccgtagtttgaaatatttgttaattttaaaatgaaaatgtttacaaaaagagaataggtgcattttggcacttatatgacactctggaatggttcctgatttcgcttattaaaggagagatgtaatatgacagctaccaaaggtctggaaggcatcgttgcgacaacctcttcgatcagttctattgtagacggtgtgctcacataccgtggttacgatatcgacgatttggctgaacatgccagctttgaagaagttgcctatttgttgtggtttggtaaattgccaacaacggatgaactgaaatcccttcgtaaaagcctgagcgattacgcgccgattccgagcgagttgattgcacaaatccaattgtacccgaaaaacgtcagtaccatggcagcacttcgttccgcagtctctgcacttgcactgtacgacgagcaagcggatgagatgacaacggaagcgaatgagaacaaagcggttaagttgcaagcacagttgccaacgattgtggcagccatcgcccgtatccgtcagggcaaagaacctgtggctccaaaagaaggcgcttccatcgcagagaactttttatatatgatgactggtgaagaaccatccgagaccgcagtgaaagcattggatcaagcccttgtcctgcatgcggatcacgagttaaacgcttcgacatttgcagcccgtgtaacggttgctacgctgtcggatatctattccggtgtaacttccgccattggcgcactgaagggaccactgcatggcggtgctaatgaagccgttatgaaaatgttgaatgagatcggtacgcctgatcgtcttgaagcggcaattcaggaaaaactgaataatcgtgaaaagatcatgggctttggacatcgggtgtacaaaaacggtgatccacgcgccaaacatctacagaagatgtccaaggaacttggcgagatgaacaatgatacgcgtttgtatgatatgtctgtgaagatcgaggaactggtaacaggacaaaaaggactgaagcctaacgtagacttctattctgcttctgtatatacccaactggagatcgaacaggaattgttcactccgatctttgccatcagccgggtgtctggatggactgcgcatattttggaacagcttgcggacaatcgcatcattcgtccacgtgcggagtacactggtcctacagaacagaaatacgtttctattgaacttcgctaatagccgcaaaaacagtataataatatggacgaggtgaagggttggaaagcagaggctttactggcttaagctctcaggacccttctctcaacaagactagtggtatgatgaatactgcatatacgaaacctaggaggaattttaactatgaaattagaaaaatttgctcacccaactgaaggcgaaaaaatccaaattgataacggtacacttcaagtacctagtaatccaatcattccatttatcgaaggtgacggtacaggccgtgatatctggaaagcttccaaacgtgtattggatgcagctgttgaaaaagcttatgatggcaacaaaaaaatcgcatggtatgaagtgtttgctggacaaaaagcattcgatacatacggtgagtggttgccgaatgatacactggaagccattcgtgagtatatcgtagcgatcaaaggaccattgactacgccaatcggtggtggtattcgttccctgaacgtagccctgcgtcaagagcttgacctgtacacatgcttgcgtcctgttcgttatttcgacggtgtaccttctccggttaaacgtcctgagttggtagacatggtcattttccgtgagaatacggaagatatctatgcaggaatcgagtatgctgaaggttctgaagaagtgaaaaaagtgatccagttccttcaacaggagatgggtgctaacaaaatccgtttccctgagacttccggtattggtatcaaaccagtttcctccgaaggttcgaaacgtctggtacgtgcagcagtgcagtatgcaattgaccataaccgtaagacggttacactggtacacaaaggtaatatcatgaaattcacagaaggtgccttcaaaaactggggatatgaagtggctgaagaagagttcgctgacaaagtattcacatgggcacaatacgacatcatcaaagaaaacgaaggtacagatgcagcgaatgcagcacaaaaagctgctgaagatgctggtaaaatcatcgtaaaagatgcgattgccgatatcgctctgcaacaagtattgactcgtccaggcgaatttgatgttatcgcaacattgaacctgaacggtgactatctgtccgatgcacttgcagcgcaagttggcggaattggtatcgctcctggagcgaacatcaactacgtaacaggacatgctatcttcgaagcaactcacggtactgcacctaaatacgcggacaaagatgtcgtgaaccctggttccgttattctgtccggagtaatgttgcttgagcacttgggatggcaagaagcagctaacctgatctacaaaggtatggaaacatccattaacaataaaacagtaacgtatgactttgcacgtctgatggacggcgctactgaagtgaaatgttctgaattcgcggatcaaatcattaaaaacctgtaaggggagatgtgaatcttgactattcagcgcaaaaaaatcacagtagtcggcgccgggtttaccggtgctacgaccgcattaatgcttgcccaaaaagaactcggggatgttgtgctggttgatattcctcaactggagaacccgacgaaggggaaagcactcgatatgatggaagcaagtcctgttcaaggatttgacagtcatatcgtcggcacttccaactacgaagatactgcaggttctgagattgtaatcatcaccgctggtatcgcccgtaaaccgggtatgagccgcgacgatctggtcaatacgaatgcgggtatcgtgaagtccgtttgtgaaaatgtgaaaaaatattgccctgattccatcgtcattattctaagcaacccggtggatgcgatgacttatgcagcttatcagacccttggttttcctaaaaaccgtgttatcggtcagtcaggtgttctggatacagcacgttattgtaccttcattgcgcaagagttgaacgtatctgttgaagatgttcgtggattcgttcttggcggccacggagacgacatggtgccactcgttcgttattcgagtgtaggtggtattccgatcgatacgttgattccggcagaccgcattgagtccattgttcaacgcacacgtgttggcggaggcgagattgtgaatttgctgggtaacggcagtgcctattatgcaccagcagcttcgcttgttcagatgaccgaagccattttgaaggacaagaaacgtatcattccagtgatcgcttatcttgaaggtgaatatggctataatgatttgttcctcggtgtaccaaccattttgggtggtaatggcattgagaaaatattcgaacttgacctgacagcggaagaaaaagcaggattggacaaatctgctgattcggttcgcaacgtcatttcggtagtaaacctgtaagtttgaaaactttttgaacagaagctaaaagaaaacctccggtaaacccggaggttttcttttctttggataagttccccagtataatggaatgtgatgtatagcacaccgaaaatgttgaggaggatgaaaattttgacaatgattatgtatttgctccatattgttggagcactggcgatgggattctatttgattctgccatttgtggtcggtaaaatccgtaccctgaatgctgcagcacaagagggagcctttgcatcacttcgttctttgaacaaagtcgcgcagtatggacttgtaatccaacttcttactggtggttacctgatgaccaaaggtgagtattctcatgtctggatggctgtcgttgttgttctgctcttggctattgcggctattggaggaatcatgggtaaaccactgcgactcgctgcagaaggtgtgaaaaacaaacgtgatgtgggtcctgagcaaagcaagatccgtatgttcagtacacttctggctgtattcttgctaatcatggtgtacctgatggtgaataatcaggtgatctaagtgcgttgcggacggttaatccaccttacgcagatgtattgttatttgttggttaagcgtttgcagacgtaattaggacaagccgcatgagatctaagatggtgtttcgttgaaaaaacaaaaaatagacagcttcattggctgtctattttttgttaataccaagatgaaatcagtggtcctcggtttatttgaactggaactagagggatcactaccatacatatcatcatacatattcatctgacacggtctacgttggttaggttgtactcacagtatacgcccgcactgcatttcgaccattacgcttggattcgtacaaggcggtatcagcatcgcgtaataaggactccagcgaatctgaccctccattgtactgggcaataccaaagcttgaggtcagcgtaataggcacacccttaacatccaggggggcattcaataaggcaactctcagttgttcggcaagtttctcggcttcttgaagcgaggtattcggaagagcgatgacaaactcttcgcctccatatcgggcaaacaacatctcagggcttaaatatcgattacaaacagagactacatgaatgatggcctgatcgccaacatcatgcccgtacgtatcgttgatgcgtttaaagtaatcaatatcaaataaaatgaatgaaacaggttgcgggttaagctgagcttcactcaaaatctcccgacctctatgcaaaaattgagtgcgattatagattttggtcagaccatcgaaataagccagttgtttcaactgttcttgcaagaagcgttgttccgttatatcgattaacataattagactgcccacagtctgtgcatccttgttatacacgtaagatgtcctgacctgataacagacggtctctccatttaactgccagtacagatcggtttgcaatccttctcttccgtattcaacgggaaacgtctttccagcaagattatgccagatttcatccaagggttggccaatcatggttgtattaagctctggcaacatgtcacgcagagatctgttgtaatcgaccagtcgattgaaactatccagtacaataacaccttcacgcatactctcgaaaatactgtctttggcgatgggtacgatggtcagtagacgtgaggatagaatcgcccagatatacatggcagatgtgatacacatgagcacggggacggggtccatcccaccgggggtcaaaccaagcaaatacagaaaagctgcgaccataggaataatctgtgaagtaatgagagtaagtaattgacgacgatacatcttcttggtgtgtctccattgtccaatcagaatatggcaggcacataacagacaggagaaggtgaatgcaccatgtacaacataccattgacccactgcgatatccatcagaggaacgggactatcttctcttagccatacttttttataaaatagatgatgaaagtcattggttgcaaccatacctagtgtaatggaagggattacaaacagcgcggcagttacctttttggataaggtttttcctgtgtactttatcatcaacatgaggccaagagatgcggagaagggcatgcctatatactccacggtggtccaaaacatcatctgctccagcgtgttgctggctagctcaatcgcataaccaaaagtatatatggagagtgctgctgtgtagagaatgaatattttggaactgggaatctcggatcttctgaaataggtatataaacacaaaaagacattcagcacggctgaagtagcgacgagtgttatatatgaattaatatgcgattccattgtcaggtctccatgttaggttagaatgattaaaccaataaagatgagagttaaagcacatcagtatactgtacattgtacatcagcccaagcagcataggaatacactttgtatcatgaaacagtctaatttcgaataaatttcgaattttggccaaacaggcattgaagcaaattggttgtttgatatctaaagagggtggtaaataacgattagagacagcacgctgaggcttaagttgctgttcatcgcagaagaataatctgaactgttcatgccatcctacagaatgagactttttcagagaacgaaagacaaggaagtatacagttagggtccatgtcttctgtaatccaatcatgttcacattttgagaggagaatgttagatgtcaaccaacacacaacaaaatcaaaaaacaatgccagcacagcatcaggatcaacgccccggtattgaatcggagatgcatcccagaccggaatttgagaagcctgaatacaaggcagcaggtaaactgacgggtaaggtggcccttattacagggggtgacagcggaattggacgtgctgttgctgttacgtatgccaaggaaggcgcggatgtagccattgtatacctgagcgagcacgaagatgccaaggaaacgaaacgtcaggtcgaacaagaaggacgcaagtgtatcttgattgcaggggacattggtgatgatgcctttgcgaagaaatcggttaagcagacagtagatgaactgggcaaactggacattgtcgtgaataacgcagcagaacagcatccacagcagaatctggaggatattacgccagaacagctggagcgtacattccgtaccaatatcttcggcatgttctatgtgacacaggcagccctgccacatctgaagaagggcagcacgattattaatacaacctctatcacagcctatcgcggaagcccgaccctgcttgactattcatctaccaaaggagcaatcacttcgttcactcgttcgttatcgatgaatgtgattgagaagggaattcgtgtcaatgccgttgcaccagggccgatctggacaccactcattccatccacatttgatgagaaaaaagtaagtgagttcggcgcaacgcagccaatgaagcggccaggacaaccggatgaactggctcccgcttacgtataccttgcttcggatgactcttcgtatgtaagcggacaggtgatgcatgtgaatggtggcgaagtggtgaacggataatacgttaagaacgtttagattcaggataggattgattatatagagaggcgtatcgctttcagcatggctgagcggtgcgtcttttttatatcaggtgaatatgtatgtcaaagatgcggatagcacctgtttacaaaagtcggcatctctgttgatacaactatgatattttattattagccttgtctcactgcagttgataacgtattgcaaagtactgactgaaaagattgggagtcccctaatctgtgatatgatagatcgagcaattatactcggagggacaagtcatatgaaaatgagcaaacagaatgcaacacattatatatggggtgggcattgcgatgatgaatcggagcgacgaagaagtggagtttcttgtaatttccaatccgggtacccgtggggacccggattgaactggattcaatgtagagcaattcattagatattaatctgatcataaaggaagagatagatgagaccgttccgaattcgccttgccatcattatgatggtgctgatcggtgtatccgtcattgtggctggatatacgatgggcagagtgtttaagactacgcatatagccgcattggagcaaaccatggtgcgcgagattaatttgctcaaagcaacttttccattccatgatgcaagtgatccaacctcggaagccacacgaaagtattattcagatcgggcgttggaactggatcgtctgacggattcccgggtaaccttcatcaataaagacggcatggtcattggagattccgagagtgatccggcatccatggataatcacttgaaccgtgaggagattaagggtgccgtcggagatggatacgggcaatccatacgttacagtgagacattgggacaagacatgctgtatgtagcactacctgtgaattcggatcaaagtgacatgattgaaatacctagcggcaaatttgatggttacattcgtctatccatgagtctacaggctgtggatcaagggcttcagcgtggttggatgattatgtttgctgcacttgggctattgttcttaattgtcgcgtttgtcagttatcgggttgcacgtggattaacctccccgattgagcatattacaaaagtggcccatcggatcacaaagctggaatacgatgccagagttgatgtaacgcgtagagatgagatcggacagctggggcttgccataaacggaatggcagacagcttgcagtcccaactgaagacgattcgtgacaatgaagcgttgttacagagtgtcctcgcgaacatgaccggaggtattgtcatgatcgacgcagggcaatccattgcactggtcaatcgggaagcggagcgtatgcttggtattcaggcaggaaaggttacgggtaagccttatactgaattgaaaagacactacgaattaacacgtaccattgaagagagtgttgcactgaaagaacggatgcatgaagaagtaagtgtgttcaacccggaggaaaaactgatccgtattgatggagtaccgatgtccgaagatgatggtggatatcgaggcatgttgttcctgttgcaggacgtgacggcgattcgccgattggagtcaatgcgcagtgagtttgttgcaaatgtctctcatgagctcaagacaccagtcgctgcggtcaaagggtttgccgaaacattgctcagcggcggggtacaggataaggagacagagcgatcattcctgaaaatcatctatgatgaaggagatcgacttaaccgattaattggggatattctggagttatccaaaattgaatcgaaacgcgcgccgctgcaatgctcacctgttcatgtacactctttcttcgaaatggtgctgggcaccttgtccaaggtggcggagaaaaagcagattcgtctggaaatgcatgttccggaggaactgtacattgaagcggatgaggacaagatgaagcagattttcatcaatctgttatccaacggcatcaactatacccccgatggtggacgagtgaagttacaggtgacgatggataatgatgatgaagttgtctttgcggtgtcagatacaggaattggcataccgaaaaaagatttgccgcgaatcttcgaacggttctatcgtgttgataaaggcagatcccgtaattcagggggcacaggccttggactttccatcgttaaacatctggtggaattgcatcatggcaaattgtctgtagagagtgaactgggcatggggacaacgttccgtgtgatccttccattcattcaagacgaagagatgtaggcgtctagtatcaaaatgtaaaaagtgtgtattgttttacaccgcgttaacaaattagtgctatgatagaaaaagtgttgtggcaacagacaacctatgaagagagaaggggtatcatggcacagcgtttactagttattgaagatgaacctacattatcaagattactcacgtataacctgacacaggaaggttatgacgttacggcagaggaccacggatctgcaggatatgatcgggccttgtcccaggaatttgatctcattttgctggatttgatgcttccgggcatgaatggtctggacattctgagcaagttaagaatacagggtgttagtacacctgttatcattctgacggccaagaacggtgaagccgaggttgtgcagggactgaaatcaggtgccgatgattatattaccaaaccgtttggtgtatctgagttattagcccgagtggatgcggtattaagacgttattccaatggcgaagatttaccacagcttgaggacaaagatggctcacgaattattctgggagagctggagatttatcctctgaaatatgaagtgacactgggtggacaatccatcagtctgcgtccaaaagagttcgaagtacttctatatttggctaaaaagccgggtgtggtactgacaagagatgatctgatgaacgctgtatggggctttgattatatcggaggtcaacgaaccgtggatgttcacgtcagttcattacgtaaaaagctggagttggacccggaatcggttcacattgattccattcgtggtgtaggttataaattggttgtcaaaagaaaaactccccatcattcaagttagcaatgatcggggagttttattttacgttcatttaacataaaggaagatttttctttacgtagagggagtagcatggacttatctgagtgatactttgtacctacataacccacctcaagacggaggtattacgtaaaggagattgcgcatttatgcccatgttgctcgaagtgaaacctgaccagcctcatgttgttttacataatgaagaattaacaacatccgaacagcagcatcatgaagtaaaggtggttgctgaagaacctgtaatccatttacatgactattatcgtcaagtacctgtcgccggagtccataccacctgtggagaagcagccacgatgatgaatcaggatcaggaacacccatgtatcgtattgtgtgatgagcagatgaaacctactggattgttaatgcgagagacgttatatcggatgttaaatggccgttttgccgcagatctattctaccgtaagccggtcatacaagtagtgaatacatctccggttatagcagataatcatatggaagccgcaacgattattgatatcgcacttggacgggatgaacagcatttctacgattgtctgctggttacggaccaaggcagactgcttggtgtgctaacgatgcgtgacgtaatgtcgctatctcgcagattgcaacaggctgttacggaagagcgcatacgtactgtaaccgagagcagacaggagatatccagaatcaacaatgcggtcaccaagctggtgaatgcagcgaatcagaccgttcatgaggcccgtgagatcatggcattgtccaagcagggcgaagagagtttgaagcacgttgacgcttcttataaccgggtacatcagcatatggagagtcaaggacaacatgcggatcacatgctgaattcgatcaaaacaggctcaggcatggcacaatccattcgctccctggcagatcaaagtggtctcctcgccctgaatgcttccattgaagcagctcatgccggtgaatatggacgaggttttcagattgttgcaggcgagattcgagcgctcgcaaaacagacccgtgaggttgcggggaacatgtcttcattgttagagaatattggtggattgacccttcagactgttgaactggttaaggcaagcggagcggagattgacgacagttcggtgcatgtcaccgcagggggagcaacgttccgacaactgaacagtgcggtgagagatttgtctcgtatagcagaggagatcgccatggaaggcgggaaagctggagaagttgcagagcacattcgtacgaagctggatgagatggtttcgaatagtgagtaaactataaagtagtcaataaagcaggcatcagcaatcagattgatccatcaagcagatcatgaaggttaaggatgtcttttttacattccgttaacatgaaagtgatactgtttttacaatgaaagggtaggatattaaagatggccgagcagcgatgaaagattatcagtatcggtctcaacgtaaagggagtttccgtgtccctgcagcgaaggagaagtgaacatccatgaaggacctcattcacattgaaaatcttaatttatattatgatacgcatcacgcgcttaaaaatatatcgatggatctgccggaaaaaaccgttactgcgttcatcgggccgtcaggttgtggtaaatcgacattgcttcgcacgttaaaccggatgaatgacatgattccgggtgttcgtgtggaaggacaggttatgctgaatggctctgacatttacagtaatgagattgaagtggagacactgcgcaaacgagttggcatggtgttccaacaaccgaatccttttccaaaatccatatacgataacgtggcttatggaccgcgcttgcacggggtaacccaaaaggctgaactggatcagttggtggaacaaagtcttgtccatgctgccctatgggatgaagtaaaggatgtattgaaaaagtcggcacttagtttgtccggcggacaacaacagcgtctctgtattgcacgggcgctggctgtacagcctgacgttctgctgatggatgaagcaacgtctgcactcgacccgatctccacattgaagattgaggaactggtgaaagaattgcatcacaagtacacgatcgttatggttacccacaatatgcaccaggcggcacgggtatctggacgcacggtatttttcctgaatggtgaagtggtggaggcagctgatacggagacgttattctccacaccgcaagattcccggaccgaggattatatatctggaaggttcggttaagcgagctgaattggaatgatcccggcatacccggagatgatggataaggaggacatgaaatctatgattcgcagaaaagaatttgatcaggagcttgaagagctgcgtaccttgctcaaacaaatgggtgaacatgtaggagcagcattggatggtgctattgagagtttacaaacgatgaacgcggagaaagctcaggtcatcatcaagaatgatgcgaatctgaatgcccttgaagacaaaattatggaacttggctccaaactgatcatcacacaacagccggtggcaaaggatctcagacgtattatcgtggcattcaaaatctccagtgatctggagcgtatgggagatcttgcgctcgacgtggcgaaggtgacactccggatggatggacagaagctgattaaacctttggtggatatcccgcaaatggcagaaatcgtgaaatccatgattgatgaatccatcgaatctttcctgaaagaaaacacagacctggcctataaaatggctcaaacggacgatcaggtggatcaactgtacagccacatgatcagtgatctctacacgttaatgtcagagcatcctaatcaggcttctcaggctatgctgctgatgatggttgggcgttacattgaacgtattggtgatcatgcaaccaacattggtgagagcacggtatacctggtgacaggtaaacgtccggatctgaatcaatagaagagcattgctatggaattggggaatcagtactgattaagtaatgcaatcatatgaatggaaaaggactttctctcaggtaggctgtgtacagctgtctgtggagaaggttcttttttgtgattaaatgtgaagtgaaagaggctattctttttgatgtgacaggtgggtatggtatcatgagagtagatgtaatttgaagaggttgaccatataatacgcgaggtgctggaatggacaagtttattctcatagatggaaatagcattatttacagggcgttttttgcaatgccgcctctgaccaactcgaaaggtctgcataccaatgcggtatatggcttcactacgatgctgctgagattgcttgaagagcataagcctacacatgtcatggttgcatttgatgcaggcaaaatcacgttccgccacgaagggtatcaggaatacaagggtggacgggagaaaacaccaccagagttgtcagagcaattccctttgctcaaagaactgctgaaaggacttggcattgctcagtttgagctcgctggatttgaagcggatgacatcatcggaacgttaaccaaacgcgcagatgaagcgggcagacaggtgcttgttgtatcgggtgacaaagatatgctgcagcttgcttccgaacatgtacatatcgggctgacacgtaaaggggtaaccgatattgagctgtatgatcctgctcagattaaagagcgttatggtctgacgccgctgcaaatcattgatctcaagggtctgatgggcgatgcgtccgataacattccaggcattcccggggttggagagaaaacagcgttgaaactgctgcaccagttcggatcggtagaggatgtactgaacggcacaagtgagctgaagggcaagatgaaagaaaagatcgaggcccatgccgaagatgcccggatgagcaaacaactcgcgacgattcaccgggaagttccgctggagcagacgtgggaggatatgcaattcgctggattaaaagaagaaaatgcgggccctgcattggccaagctggaattcaaatccttgctcgaacgcctgtcgttcagtggcagcatcggttctgaacaggaagcggtccctgctgccgaagttgaatcctccattgcaacagaggacaacatcagtgagctgttccgttccctcgattccattgatgtactccacgtggagacacatggggataacccgcaccaagcgaaattgattggacttgctgtaggttccgctggaacatatacgttcatatctcccgaattgcttcattccgaagctgcggctccagtgcgggcgtggcttggtaattcagaccagccgaagcgcggttatgatcttcatcgtgtagacctggctcttcatgcgcatggtattgaattcgctggtgcgtcatttgatgtacaactagctgcgtatttgcttgatccaacggaatccaaccagacgattagtggactcacgaccaagtatggtttgccgtcacttgtggaggatgacacggttatgggcaaaggggccaagtacaaggtgccggaagtggagatcttgggcgatttcctatgtcggaaggctgctgcagtagcagccattattccacttcaggagcaggtgttggaaacggatgagatgaattcactgttccatgaactggagatgccgttgtcacgtatattggcagacatggagaaacagggcatcaaggccaatacagccgatctacaggctttgggcagtgagtttgaagaacagatcagcaggttgatggctgagatttacaagctgtcaggaacggaatttaatctgaattcaccaaagcaactgggtgagattttatttgatagactgggcttgccagtggtgaagaaaacaaaaacgggttattccacagatgcggaagtattggagaaattggctccttataatgatgtggtcaagcatattctgcaatatcgtcagcttgccaagctacaatccacttatgtggaaggattgctcaaagagatatccaatcgggatggcaaggtgcatacgtattatcgtcagaccatcgccgctactggacgacttagcagtcaattcccgaacttgcagaacattccgattcggatggaagaaggtcgcaaaatccggaaggtatttgttccttccgaacctggatggtccattttggcagcagactattcccagattgaactgcgtgtactagcccacatttcggacgatgagcgcttgaaggaagcgtttgtcaatgatatggatattcatacaaagaccgcttcggatgtattcggcgtgaagcctgaggatgtggatggggatatgcgtcgttccgccaaggcagttaactttggtatcgtgtatggaataagtgattatggtttatcacagaacctgcatattacgcgtaaagaggccgcgcagtttatagatcagtattttgaagtattccagggtgtgcgccgatatatggatgatattgtgaaggaagctcgccaggatggttacgtcaaaacgttgttggaacgtcgtcgctacctgccagagattaatgccagtaacttcaacctgcgttctttcgcagagcgtacggcgatgaatacaccgattcagggaacagcggcagatatcatcaagctggccatggtacagatggatgaagcgctacgggaacgcaagttgaagagccgtatgttgcttcaggtgcacgatgaacttgtattcgaagtgcctgcggatgaattggaactgatgaaagagttagtaccatctgttatggaaaaagcgttggaactgtcggttccgctgaaagcagaagtcagctttggtgataactggtacgaagcgaaataaatcaagtgctgcgcggtttttccggtattttacaaaagggctttccatgtttgagatataagaaaagggtcccgctgagcgccatcttccgttataatataggggaggtgagaacatcatgccggaattaccggaagtcgaaacagtcagaagaacattgaatcaacttattgtgggcaaaacgattgatcatgttaccgttagcttgccgcggattattcagcggccggacgacatagatgcatttgcaatggaactcgcgggacataccgtcattggggtggagcgccgcggcaagtttttgcgtattttgctggacgggctggtgcttgtctcccatctgcggatggaaggaagatacggtgtgtacgagcagcatgaagatgtggagaaacatacacatgtgatcttccattttaatgatggtacggaattgcgttacaaggatgtgcgtcaatttggtacgatgcatctgttcaatgcaggtgaggaactggtgtccaaacctctgctgaagctgggactggagccgcttgatccagcttttacggtaactgcattccgcgaggcggttggcaagcgtacaaccaaaatcaaggctgtacttttaaatcaggcatatgtggttggtatcgggaatatttatgtggacgaggctctatttcgcgcaggtatccatcccgagaccatcgccaagacactgaccgaagctcagttaacggtgctccatgaagcgattgtggctacgttgcaagatgcagtgaatgcaggtggatcttccatcaagtcctatgtgaatggacagggtgagatggggatgttccagcatcaactgaaaatctatggacgcaaatcagaaccttgtacaacttgtggtacgttaattgaaaaaacggtggttggtggccgtggaacgcatttttgtccgaactgtcagctgctgtaacatgaactgaatgaacgaaatgatgaaatcatagcacccttggattcctccctccatatactgatatggcagaaataagcgggcgtatacccatactggcatcttcagttggcacgagtaccgcacagaggaggagtccggggtgctgcatcattttatttcattgctggcgcttgctttggcgcttagtttagatggttttggagtcgggattacatatgggttacggaggactaagattcccctgttatctatcgctgttatttcgatctgttcgggattggttattgccttgtcgatgcaagtaggtgtgttgttgtcccatgtggtgtcaccggatatcgcttcgatcgtgggagctgttatattgataggtattggtgcgtggtcactgttgcaactaattcgaaagcaaggcaaagaacagctggaaacagatactggaatgggtgagggaacagaagcaaaggtaactggagtgggagaagcacaagagagactgtcggattcaaagggcaggaatcaggtgcttgcactggatctggagcagtcggcttcaaatggatcactggaacgaatggtatttacactggagctgcgcaagctgggcgttgtcattcagatccttcgcagtccctccaaggcggatatggataactcggggagtatatctgctcaagaagcgatgtggcttggtattgccctgtctctggatgcgtttggagcaggtttgggagcggcacttctgggattccctacactatggacagcactcattattgcactgtttagtggggcgtttctgtcactcggcatgaaggttggcctacgattctcagctctgcgctggatgcgaagactgtctgtattgccagcgctattgttaatgattatgggaataatgaagttgttatgaggtgaaacgatgaatataggcttaaccggcgggatcgcgacaggcaaaagcagtgtttccgcctatctcgccagtaagggagcgttgctcatcgatgcagacgttattgcccgggaagttatgatgcccgggcatcccgtgttggccgccgctgttaagcggttcggacaagccatactgaacgaagatggaacactggatcggaaaaagcttgggagtattgtttttcaagaaccagaggaacgaaaggcacttgaggctattacacatccggcgatccgaagagagatgcgcgaacgggctgctgcatacgcgttgcaacatccggataaacttgtggtatctgatattcctttgctctacgaatcaggcctggaggatggtttcgaggaagtcatggtagtatatgtcccgagatcggtgcaacgagatcgcttgatgagtcgggatggaatgactgcagcacaggccgaggctcgaatggatgtacagatggatattgagcgcaaaaaacagctggcagacattgtcatcgataacagcggcttatggcctgcgacggagcagcaaattgactcatatctacagcgtaagggtttgttatgagaatattgcgtaagaaacgtgtactgctgttgatgtttgtgtcctttgtactggtgttatttctgaatacaaactggatggcatggttctatcccatacattataaggaagagatccgtgcccaatctcagagttatgaggttgatccgtttctgattgcttccattatcaaggtggagactaattttaagacaagcaaggaatccaaacgaggtgccattgggctcatgcaactgatgccggacacggcgaattggatactggaacaagccaaaattcccgacacttcgctggaggaattgaagcacgagcctgaacgaaatattcaattaggcacatggtatctgcggaatctgtctgatcaattcgatggcaatgaagcagttatgatcgctgcatataatgcgggaccaggcaaagtaaacagttggcttagagatggtgtatgggatggctcgttcgatacagtgaaagatattccgtttggtgagacgcgtcactatgtacaaagagtcatttactattataatcagtatgtaaagatctataatacgttctaagtatataagtagaagcacagagcaggccggttattcaccggccgctccatgctcctctgtgtagcgtattacgatgcagatattattggtattgacctgccaattgctgttctgcaattgttaccagacgcttcgtgatgtatccaccgatcgaaccgttctcgtaagaagtcatgttaccttggtatccgtcttgtgggatgctgattccgagttcttgagcaacttcatatttcatttgctcgagtgctgcggaagctttagttaccaccaagttgttggagttaccattgctttgtgccattgctgttcacctcctcgcgggttggtaaaagtattatgtgtcggcaatgcgtttttcattacaaaatcagtacagggaatatgtggtaaaaagtaaaacgtgggaagtgatctgttttgaagtgtccttattgcggttatatgggtaccaaagtgcttgattcgcgtccggccaacgaagcaaaatccattcgtcgtcgccgtgagtgtgagcagtgtgcccgaagatttacaacgtttgagatgattgaggagactccactgattgtcattaagaaagatggcagcagggaagagttcagccgggacaaaattctccgcgggcttattcgtgcctgtgagaaacgtccagtctccgtagagaccctggagatgatggtatctgaagtggagaaatctctgcgtaatacagctgatgctgaagtggagagtcgccagattggtgagctattgatggaacagttgtttccggtcgatgaagtggcgtatgtccgttttgcgtcggtataccgccagttcaaagatatcaatatgttcatgaaagaactgaaatccctgttgtccaaagacgatctggaggattagtgaagttggtaaagggagaagagcagtctggagttccagtccgtgtgtaccagagaaatcggttgttcttctccaatcactttggatcttgagaaagtgattgacagcgaaagctggattttatatgatataggagtcgcctgtggaacgtagcagtgttggacaagttatctatttcatatcctggggccttagctcagctgggagagcgcatcgctggcagcgatgaggtcaggggttcgatccccctaggctccatactcgtagtaaatccgctaatatagcgggttttttcgtttgtctagacgttgactgttaccgtggacgcctcgcagatatgcgctccacgcatcgcagatatacgcgcctaatccctcgttttcttaccgtaattattatcgaaggagacggtatagaatggataaacgaaaaggaagaacaattaagagcgagcgcacatcgacgcgcttacaacattcgttagactatttgttcgattattactaccaggcgaagaagtcagaagggcgcgcggagaatacgttaaagacatacgtacagaattacaattacttttgtgaatttttggatgagcgtaagatcattcgtgacatccggaatatcaacgttgaagtagggcgtgattacataatttggttacgtgatgaaaaacgaaggttcagcgataactgtaacgttccggaatctgcccgaacggtcggcctactaccaaagtcaattaacacgcgcattaagaatatgaagactatgtttaagtttttaaaagaagaggaagtaattgaggcggacccgtttacgtacttaaagaacgtacaggatattgggaaggatattgaggtacttaccgcggaggagatgagcgacctcctcaaagcgccaaaccagcgcaaatacagcgacttccgtgatttcgtagtcataaatctcctgattgatgggatgttacgcgtagatgaggcgttaacattacgtaagactgacgtagacttcactgcatgctgtgcaactttacgacgcgaagtgaccaagacgcgtaagcctcgaattgtgccgatcacaaaacgaactgctaagctgatgcaagagttaatccgcgaatcaacggagtttggaagtgaatatatattccttaataattacggggaacggttggttccgaatcacttccgtcaccaattaaagaaatatgcagatcgggcaggaattgagaagcgtgtttatccacatctactgaggcattcaggggcaacgctcttcttagaggagggcggatcgcaacgtcatttacaagtaattcttggtcacgcggatggaagaatgactgcccactatacccacctatccgataagaacgtgaagaagaaccacgacgagttctctccgctaaacgcggtcattggtaagttagagaagcctagaagaactaaacggtaggctaacaaggaccttcctccccctttcttcctctcagtaatgatgaattaaacctattaataggcaaactgtacaacactcgcccgcatcggatatcgtttccgttcgcgggctttttgtcgtttacgggagcgcatcgctgcaactacttatttcgcatatccgcgtaatttcaagagttggcgacgtcgccaggtttctcccgcttgtataatccgccactcacgcgctagtcaaattacacgacgtcgtggactacgtatcgatgtcgatacatccccacgtggggaacgtcattagatgttgcgacgtcgcaacgtgtaccgccgacggtacatcacgtagaatccccgtaagatcaccgtacatatagcgcgtccagccgtctgagtacgttccccttaccgaagccctaacgcgctgattccacggcaaaaccacgcaaaaaagagccgtaatggttaacggccctcttcgttgtcttccggtatgtattcgattagatcgccaggtaacacgcctagctttacgcataacgtattcagcgtaggaaagtcgatccgtgcattagcgttcagcgcgagagcctttacggtgttccggtttattccggtgatttgaacaacgtctttctgttcgagtccgcgatccttcattatcttatcgagtgagaatcggatagccacaaaaattcctccaaaaaaataatgtagtaaactagttgacaagaataacacgcgggtgtatattagtaatcaagtaaactagttgacaagataacctgttaacatcttatacgtagtatcgtaccaaatggtttcatcattatcaagcgatagtgtgtccggtctgagacagtgaaacttaatccaacattcgagttactttaaaaatatgatttgaaaaggggataacaaaatgcaactcaccgttaataatactcaaactacgtctaacaatatcaaatcgaacgcctacggtcgtagattcctgaaactacttcgcgcagtatattgcctaattattataacgaaggaaatcgtagcatgagtaaacgggcggaagtggaattggcttctatggttctcgggccattcgataatgactgggaatttgctctgtacacaggttatgttcttgatgaaaaattcatcttcatcgtggatgattctcaactatggcttagacatgtacataaaactcacatggatcatttatacgtcgatggtgagtcaggggggatggttatcgcgaatgttgaaggtgatggccgcgaacttatagacattatcattgagcgtctacagagtatgtcggcattggactttctgttagacacgttgctttggacttcgggccggggagatattaatttgaagcttgaacgattacataccgcctgacgagtctgtgcgcggagccagacgaaacctacggactatgtccggacggtcgcggaacttcccgcaagcatcacgtaacaacgtactgtaacggtgaaacaaccaaactaatagccgcgcgggcttaaaacgccgaggaggcatccatggaaaaaacgacagtaatcgaaatcggttatgtacgtgatcatcgcactggtaatttcattgttacactcattgacgaatccttccaccctaacagtaaccgccgtcgccaacagatcgttgtgctacctggcgcattcttccgcattctaaccaaaatagaccgccgatccatcgcgaacacagtttatgtcacgttggaacaagcggccgacctcggattcattgtctcgaaaattcccttaaccgttgaagcaatcgcctaattctcttatttacccgtaccgtcagcgctaactggcggatcgctatgcggatagtctgtactttctgacgccaatcggaaggatcgccattcagacgtttaacactgattaacattacgccggtctagcaccaactattccggcatttccttagaatattccgcggcacggaggaggcaaccttcgttcaggcagcgcgttcacatatatcgagtgtaagcgggaacttacgctctgaatcacttgtacattgacggagggagcggcgattggctatcgcataggcgcgctcttttccgttgttatatctagtaatacgcaagatagcggacaaggtttcaatattccttaactatttttcttatttgttgtcccaatctccgaaataaaggtgcctatattaattatccggcaaatgtcccaacttctcaattttttgtccttatatataatgaggacggaatttcaccaagtacacccgagattttaatcggccggcattagtagagtatacagaagtttttcgtaaaagtgtgccaaaccggattgaggatcgttagtacggatatacccgaaattggaggtgagcggagttgatacggcatagagaaattttccgtaaagtgtgcgaaggatgatcggcagttgtcaatataagtatcacgttaagtacccgaaatttcgtccgagcgagaacaaagtaatgtacgactcgtaaaagggtgtcgtcaaatttaataaggctgaaagtgtgcgaaacgtgatcggccggcaacaaggtagtataggtattccgcggatcattccgcatctattaaaaccataacgaaaaagggagagatttactatgacaaaccaattgactacgcgtgagcagtatatccaggagaacactaatgcatggagtaagagaggcgcagcattcaaagaacgtcgtacccgcatgggcttatctcgttccagagtggcggaaagtatcggcaccagcgagagcactctccgcaggtttgaactaggctatccggtcactagatcagagcttgttgcacgagcatacgaaatttatctcgaactttggttacaggtggtcaaagacattgagctagaaagaggtcgtttccttatcgatcaagatgcggacgaagccggcaaggttacggttacgatgcgcgagtataaaaaagttgccgagtttgacacaggtgacgcggaattgaatggaaagcttgcggttgcattctgtgagggtaacggtggcggctacggttacgcaatctagaaagtgagaaaggagcatcgcaatgacaatcgacgtatcaaaaccgctcgcccacgatgacggatttgcgcgtatgccaaatatcttattccggatgtacccgttactcgacgggttcactctggaaacggtgggtttatacggttacttgctgtcctggcgtcagaatgaggcggaccacgcaatgtacggtatggcatggcttaggcaggcggatatcacggcggaaacgggcatgtccgcgcacaaaatacggcagcatacggatgtgctgcgtcgctacgggctgttaaacgtcaagaaatcggaccggatcgctaataagcttgtatatgaaccgcttgagccgctgacatacgaggagtttcggcggacttattggagagaggaggcggcgagctcatgagtagtctcggggaactcgcgcaagtagcagtcaaacagaaggcggacgtgcttgagagtgggcggggtgggtattctccgtctcttcactcgctattccgagtccatttgaaggagcttaatgataagtatgaaaaaaataaagccagagatgctatttttctgctcttatatcttcatgcgtatgtgaacggcacggagtcaaacgacctgtatatgtgggcattccctacggtaaaacagatccgcgaggaaacaggtatacacggcgatcggatcaatacactctgcaagatacttgaggtcgaagggctattggttacgaagatgatcccgtggcgtggaaacgtcaagaagatataccttccgctattttacccacatgatggagatgtccaagtaccatcgattcccgtaaacggagtggcttaaatcccgtattcgggaaccgtcgcgatccgtttacgggaaagtaataagaacgaagtaacaagaacgaactaacaagaataaacattaccgctcggttaaattcgcatacgctcattgaacctcacgggacgatgttctgacgcgcataaaggtatggaggggatgaatagcgcgggaaaagcagagtaagaacaaacgatacgcggaagttaaaccactcaatatccacaaggaggtaattcacatggaagcagccaaacagctagtagaatacagcagaggccccaaactcgaactcatcgtcacgcccgacgttgatcgctacgattactccggtaacgcctgcgaactcttcccgaattggacgcgttccaattatcggacgtacgctaaacagccgctcgcccagcggctgcatatcgcggagactatggccgagatttatgacgcgcattattacaataaccacgtaggcggtgacggccgcttccgtacgcagctcgaataccagcgcttggaacgcttggccgactatattctcgcggaggaccacgctaaaggtctatctatcatgcgcgatccgtacgatatgcctcgcgaccgtgaccttatcgttccgccaggctcaggagcgcgggagtttatgcggaagcacagtatccgaatatactgcgaggctgacgcggagggcgccgttgaaaaattcggcggaaagttatgccaagcgtgccagcatccattcgaagggcgcggaaatcagctcaattgtggtccaacctgccgccgcctgtacaagacgttatgggagcgcaagaaacggtatggaacaatcgaatttgaaggcgagcggaaccggatgcaactggaatacggattctatagtccggaagagttgatcaatatacagaagcgatcagaattaccgaagggtagtgcgcggcagctcgctaagatggataacgcgaggaaacgcaaggagaagcatgggcgtaggactaccgttcagctcattgacaagaaaggaacagaaggcgcgggatatctggacggggtgtacggctggacgagtgatcgtaataaatacaagggaaacgaacacgacatccgatggggtgaagtcgtcacgtacaacatgtacgagcagcctttgacagagaagttcgtagattgccaaaagcctcgtactgtccacatctccgcttaagtagggaagggaacgcaagttcccgattatttatttcggatgtatgcgatatttcaaatgagcgaaggaggtttgtgataatggatggatcaggagtacgtggtattcgggtaatggccggcttaactcaggcgcaatttgcggaagtattaaacgttagtcagtcgtgtgtgagcgatgtggagaacggacgacgtaatgtttcgcgtgacctgaggattaagctagctcaggtgtttggcacgggtgacgaagtagtagaagctattagaagagcaaaagattctgacaaattggcgctataaaagcgtctttatttttgcattcacgctttaacgatttaaaacgttaatctaaggaagtgaagcgaattgtccaacgctatctggcgcctaaatgccgataccatcgcatgttttacggaagatccagaagtcatcgcaaaggtccaccgcagttatccggactttaccgtcatggcaacgtacggacgcggaggccaggtaactggtatgcagtatagagttcctaacgctaggaaacgcgtagctaagcgactattcaacgtggtacagattacgtaggtattacgtgaatatagagcttggaacaggcggaggaacgctaacacctcggcttgtttggcgtgcttagactcaagcgaaatcaagggaaaagggcgcgatatatgcgtggttttgagaggagataaggtaacaagtggacagagaatacacgcggcaatgcgaatttattaattctgacaagacttgcgttctaatgcagggactagccgacgaaactgatccgcgctgtaagctatggcgcgatgaacaacaggactgtcgctatttgaggttacacatccttaaaggacgcggactctaccgtggaggatgggcacgcaggaaacgtaaaggagctgaggcgcaatgattaccgagccgattgaaataagctacggagcatcccgaccgcttcgattcgaaccgtacgtacttgacagctatgagcgcgaggactttctgacggtgatttacaatcacgtttatcgcagcttcatcatgagtacggcggtcaaattggatgagccgcgtttatgtcgcttgattgagaaggcaacgatcgagatatgtaaagagcacgctccaacccggaacttcggaatcaagaagacggagattcgtgccgcaattctggcgctgattgacggccacaaggcgggtgcgggcgatggaggcgacgggcagagttgagtattgcgatattgatcgcggcttcctcttcgtaagctgcgcgggaatcgccagtacggtgtttgttcacgtatcccacgtacgcaccgaaggaactacgttgcaggtcggagataccgtcgcgcttgatatcgtaccgggggatcggcggccagtcggaaaacgggtgacattaatttacggagggtgacgagatgatggacgaacgtttattaccggatcaaatcacatacgcccatgtcgcgatacttaacacgggtaacggccgcattgtcgccggcgtccgcctttctaagcgtgatcctagcgtcgaaggtaccgtttggtactgcccttaccgggtgctttcgcttcattatgatgagcgcgatacgaagacgattaccatgcgtcaggttataccgctcatgatcaaggacattattcggaacgttgacagccgtacgaagtttgttgtcatacgagggaacgcgccacatttccaaagataccgccagtacgagcagcatgtccgtttgttcgcggagtctcgtaacgtaggtatccgaatgacttggaagccgaacattgaaaaccgcattccggagctcaaagaattagcaaacgatgctttacggcgcggcgaatcactagccgggaccatttaaaggaggaataaagatgacagacattaacacgcatatccagtacgcaacgagcatgattcatggagatacaacggtgggcatctcaaaagatatcttcgacattgttaaaaacgaggttaaggagatccaggaggacaaaacgctcacaccaatgggtatggcccaaaaggtagacgaagcccgtaaacgtggcgcgtaccatctcgctaatatgctcaacgcgaatcaaaacatggttagtgctgaactcaaagcagccgaaataaaagctaacaaaatcctagagcaattacccccaacgcccccggacactgaattgcgccagttcaacgagaagtatgcggagctcaaggcgagcctccaagttaacggaaacgcacgcgcagccgggcagcttcttgagtttatgcgcggggtaaacgatccatatctcgcgaatctcctgacgcaagactatgcggagcttggtggcgcacttatcaagcatacgaagaacccgatcggcgttaatacactctatggaactctacggagcgctagagataccgcggaacaagcgcaagcccgcacagcacttaaagagatcactcagctccgccagacaagatcgtataactcgttactcgaactcggcgcggacaaagcgctcggaccgatcggaagatccgcgatgaatgatccggccggcttcatgcaggttaacgaagggagtgcgtaataatccgataccaactgtacattgcggctgccgctgatgataagcgggcggcctattcgtacgttcttgccaactttgccggtatcgtcgcagagggaacgttcctgacggtcggcgagcggaaattcgacgattcattctgcggacatgtcgctatccaacgcgcattaagaacagcggcgaacaaggcggaaggtgtagcggacattaccgttgtgctagacgagaacatcgcaaatgacgtcggcttcgagctgcttggcgtcaatcctccgttgtatccggcgctctgccggactactcagcgcattatgaagcggttcaactcatgcgagctggctgcgatgaagaagggtgacgagttaagtccggaagaagccagcgtattcgacgagtgtttggcggcgctggaaaaggtaaggacattgcgcggacagtttgtgctcgcgtgggaaacagtaatcggttcacaaaatatcattcgataaggggaattgacaaaaatgaaaatgccacaaaacctactcacagcaatcacagcttaccagacagagagtgaaaaagtaagtaaagcaacggagctgcacagagaacaggccgcgaaactgcaggcggaacttgacgaaacccatgcacgtcttgccgttgcggtagacaaaaccctcgacgatccgattgaggagaacgtagcccgcgaagctgaattgcaacgcaggattgtggagcttgagatggagattaaagccgcgaccagccgcgccgatatgtcgttctctcgttctcacgccaagttgaacgaactcgctgatgcagctattgaggtcggccgcgcagaatcattaaagcattttaacgacggtttcgatgcaaaggtcaaggagattgaagaggcgaaatttgcgtgccttacggcgcttattgattttcataccctgcggacagacgcgtgggatatctggaaaactgccggagatggtacgaacagtaaccgtgcgcaatatggacaacgcccaaacttccgagaaattacgccgtttcatcgcggcgaccgccaggttctcggagttactgagctcgaaatcagccgagcgtataaagatggcaaaattcaatggactagcgttgcagaagggagggatatccaatgagtaaagaccgaatcgcgtttgaagcattcagtggcaacgaagccggattgattacgttcaaccgagtagcggctagtctcttcatttcgaacgacggcgataacctgattaagcttcaatggggagtgcgcggcaagtatttccatgattatatgctgcatccgggtgaagtttttgacgagaggcttgacccattcactgagattgaggtgtccgcgccagatgggcgcattagcttccacggctggccccgcagaaatccataagaaacataattacggcccttcggggccttttctaatataaggaggaattttatatgaacgaggaaattatgttgctgacttatgagtacgtgggccgggacattgagaacatgctgagcatcttggatacgtcagcttcggagcaggagatagaagagacactaagatacggtgcggagtgtgcgacggcgaagttagaaaccgctggcctttcaacggaagaacaccgcggagttgtaaccgaaggaataatcgcgcttattaaaacgatgcataaggggagctgctaatggcggttgtagacgttggaggaatacgggccgtaatcacggcggacattagcggatataaccaaacgatggataaagcaaaaactaaagcgaaggaactcggggaggccggaaaatcggcgtcctcttctttttctgcgcttaatacgagccttgccggagttggagcgtccgccgcgcagattgagaagatcaatacgagtatgcgtaaggctaatccggatttgctacggagacagctagaagccgtccgaacggagatgaaacgattaggcgcaagtagctcggagatagatcaggttacgcgcgggttggagaagaacgcgaaagcggcaaagggcgctaatggagagttgaaaacgctcggtctcgcttacatggcgttatctgctgcgatggcgggcgtgattgcaaaggcggttgagactgccgcgacatttgagcaatcaatggcgaaggttaaggcgatatccggcgcgactgcggaagaatttgaaaacctgcgtaatcaggcgttagagctcggtgctactacggtgtttacagcttcgcaaagcgcggatgctatgggatttttggctatggctggatttaaaacaactcagattatgcaggcaatgccgggtgtcttgaacttggcggctgcgggccagatggaaattgcgcggactgcggacattgcatctaacatcttgaccggttttcaactagaggcaggcgaaacgggaagagttgtcgacgtattagctaaagctatgacttccagtaataccaatattgaacagttgggatatgggatgaaatatttggctcctgttgccgcatcactaggcgtatccatcgaagaggcagcgaccgccgtcggtgtcttgtctaacgccggtattcagggcgaaatggcgggcacgcagctacgtgcgattctcttacgcttggtcaaaccaccgaagcaagcgcgcgaagcccttgccgcgttaaacgttacgttacaggatacacaaggtaacttcttaccgctcggcaacataatcggacagctcgagcgcgcattcggcggcttaactcagtcacagcaagcgcaagcagcgagtatgatcgcgggtgtcgaagctacctccggtttccttacgctgatcaacaacgggcaggcttcgtttgattcctttacggaaagtctggtaaacgcgggtggtacagctcaagagatcgcggaaatccaaatggatacgctcaaaggcgccattatcgaaatgacatccgcgctcgaaggcgtcggaatcacggtaggggataagttcgcgcctgctgtccgtatggttacggaggaaataacgggcctattgctaggatttaacaacctggacccagcaatgcaaaccgctattatcgcatttacaacggcgacacctcttattatgggcggggtgatggcgatacgagcgttgtctgttgctctctggggattagccaaagcgaacccggtcttgcttgcggtctcagtagctattggactcatagcggcaggagtgtccgcgctcatctctagtaacaatgaggcggcggaggcagtgaagaagcacgacgatgcgcagaaatcgctcaacgagactttatcacaatctccgctagacaggtcagttgcacagttacaggagcttcaacagcagactgttgatctggttgctgaactggaaaagcgtgcagaggtacaaaagcggctcaacgagatcgaagctcttcaaaaggaaggactcggaacgccggctcttcttaacgaaatgttcgagattaatgatcagctcgaagagatggacggtaaattgcgcggtatgggctacgacggcgtagaagacgcgactgccaagcttgaagagatgaacactgcgatcaataattcgacgcctgcgctcctgaaaatgaaagaggccgagatccaggacctcattgttaaaaaggagaagatagcggcgacggaacaattggttgcgcggtatcggaaccttgaagccgttcagaataaggacgcaaatcagaaacaagagcttacggatctcacaaaccagctccgcaaagagtacccggacctcatccgcgaaattgattccgaaggaacggcgcgcctgaccaatatcggaatcgtggacgatcatctttccgctgagagagacttcgttaacgagtcagcccgcatgatggcgatatacatggataatatggcggcaacggctcgtgctaacaaagcgtctatcgaagcacaaatcagcaactatcaagcgctgctccgtacactaagcgcggtagccggtgcgacatccggtatgaagcagaaggttacgggactcggtggagtcagcgttaaccccacgctcgaaaaccatatccagaataacgcgggtgattatgcaacgcaggtacagcagaagctcggtggcctatctggagacttgtatgatcagacgcagcatatccgcgaagttgagcaatacaaacagggacttacggacggttccgcactcgagcgtactaaaacggccggagtaggtgggatcaatcttggcggagaagataagaaaaaatccggcgggaagaaggcgaagtcgagcaaggctaaaaaggagaaatctgcagccgaaattgctaaggaactccgcgacaaagcttataacgcggatcttgccacgatacgttatcaggccgacatgtacgattggtctgcagagcaacagaccaaagcatatgaaaagcttcgtaaggcccatgcgcagcatctcaaagagacggtagaagattcgcggactcttaacctacagctcaagcggctacaggaggatagcgttaaagcccgttacgacttctcctccacttggatcgataaggatcaacgtcgcatggaggacgccggtaaatctgaggttgagatggctaattcgaagctcgcagcctggacccgcgtaagggatcgctacaagaaggattccgaggagtacaagaaagccgacgaacaggtatatcaggcgcggaaagacttggcgaaagcagacgaaaaggccgtagcggacgcatactctgcttctgagaagtggattacgaaagaggagcgccgcatggaggattccggtaagtccgaggcggagatcacgcagatgaagattgccgcgtggacacgtatccgagatcgccatgagaaggattcggagtattacgagcgcgccgaagatcagctctacagtctccgtaaaaagctcacgcaggataccgaaaagctggcgacggaactcgttaaagttcagaaaacagcggtggaaagcgcgaagaaagcggaattggatgcgatcgaggagcgtaagaaggcgttcgttagcgctcaggatgagaaaatcgcagccatcgacgcactcatagcgaaggaagcggagtacaattccgacgcggattacggtacgcagctcgccgagaagaatgcgcgcatcgatttgttagcttcggcggtgagtccggaaggtattcaggagcgcgaggatctgatcaaagaacgtgaccggatgattcttgagcatgagcgtgacctgcgtaaacgtgagctggaatctcagaaatccgcgctacaggatgagaaggacgaacgtacttccgcattcgacgcggagaagacgcagacggaggccaagtatgacgcgctgaaatcggcattcgacgcgtattccgacgatatcaagttcatcgaatcggctatcggagagttccggaagaacgctaacgcggcggctaacacggagatacttacgcaattggattcgtttgtgtccgagtataacgcgaagatggcttcgttggcggctccggttggcggtgctaatacggacctggcggagtacaactcgaataaggacgcttggacggctgcgaaggcaaaaggcgatactgcggaaatggcgcgcctcagttcacgtaatgaggagctgcgtaagttgtacggtatcgataaggacaccggtaagcttcagcagtttaaagtcggcggcgttgtccaaggcgcggcgggatcggcagtgccggttattgcccacgcgggagaaatgattcttaacgcgggtcagatcggtaatctcttccgtatgatcgacactggcagcgtagcaggcgcgcaagcacctcagattatcaaccaattcgatatgtccgttgcagagctcacgctttcggatagagcggacgtcgatctgttcttcacggagcgggaacgtatggcaatgagaaaccaaacaagggggagtaaagcagtatgataaatacaaaataccttcaatcatacgacaagaaccgtaagaagatcggcgtcctagtagacgcgcaagatgtacaaaggctacgccgaattaactcggacgatgagctcacgttccttgtcccgatgatctcggaggacttcaaaagcaaaatccagctaaaaggatacatcgaggatgagcgcggacaactctacgtggtcaatagcatccaacgggtgcgagacggcaagaagctcaccgcgcaagtccaatgtcggcatcttatgttcaagctcgtggactacaaggtattatactcctcttatatcccagaagcgtacggcgttcctattacgagattgacggatatcattacggcggccactaacggccgctttactttttccgtagatgatacgtttgacctttgcgacgttaaggattggggccgcacgaacgcgctcgaagcattgaacgcggtagtctcgatgtatggcgcggaagttgatccggataatttcgtcatccacttgcgcaagaagatcggcgcgaacaatggcatgcagtaccgaatccgtaaaaatatcgtatcttctacttattccagcagcggagagtcactgtgtacacgtatgtacgcgcagatgaaagacggtcgtacatggatcggacaaccggccacaatactgacagcggatgagcgcgcgagacttgccgccgtacctggcgcgattgttaatggtattctgcaatcgaactaccttatatctcagtacgcgagcgtatggggatcggctgacactccttattatgactcggaactgattgagcagaacattacgaacattacggagctgctacgtgagacacgtaagaagcttgccgacaatgaggtacccgcgctagaagtgacggtcagtgccgcggacgtccataagttgtatgaatccgaagccgctccgaacttgggtgatacggtttattgcgttgatccggaaatggagctcaccaatattacggcgcgcatcgttgaaatcacggagtatccgtatgctcgcgatcaacacgcccaggtgacgatagccaacgttatgcgcaaggattacgcggaaatgatggcggatctcgacaagacgaaacagatcgtcggcaatatcgtaagtggtggccttgtccggacggaagtgttcgagacattcgctaagcaggcgatccatgacgtggatgcgtccaaaacggagatcaaatacgataatcgcggcattgtcctacaggataagacagacgcgcgtaaccaagtcattatgacttcgaatggtatcgtactctctacggatggcgggaacaccgctaggacggccattacagcgcgcggcgtacttgcggaaacagtcgtcggccaattcggtagcttcgtatctatgctgatcggctccggtaataacgtaacccaaattaatacgaacggtatcgcggcaggccacgcaacatatagcctggcgcctttccgcgtagacatgcaaggtaacgttacagctaatcgattaacggccaattccgcgaatatcttcgaatctaatcttaatgcgtctacgtggaaggacggagtgttctccggaaacatcaccgcacagggcgagattacgggcggtatcgtaacgggggcgcttatccggacagccgcgagtggtcgacgtgttgagttgaatacgaacggattccgtgcgatcgataccagtgggcgggcgcgcattacgatagcaacggattcagacgaagggatctccggtttggcgttctttgatccggcaggaagctggcacgggcagttaattggtacgccttcaaacctcagcatgaccgcgcgtgacggtctatatctatctggaggtacgggtacgattacgcttggctcccgcgttaatttcacatacggaattgatatcggtttagtgaacgggttgcagtctcaaattgactcgatgtggcaggcaattaacaaccatacccacaacgtaactttacctacccacaatcacggtaataccgcgaatcagaactggggcggaacgttcaccacttcgagatctgcgtaaatactgtagtgctaagttcctgatattggtatactggtcgcaagacataatttaggaggaacaacgtatgaagaagaagatcacagcgggtgtccttgcggcggtattactaattggaggaacaacggcactagcagccgcgcctactctcgttggtaagaaggttgcgaaagaggtaacggtaaggattgacggggagcctacgaagaacaaagcgataatcgtaaacggagtgacttacgcgccggttcgtgagattggcgagtcctccggatacgacgtttcatatagcgggtcagtcgttgacctagaaagtaccgcggaaggagtgccgggaatggaagtaccaggattcgacgatacggtaagagcggaacagattgcgcaacgtgagaaggccattgaggttcatgaggcggagatagcgcgtctacagcaaggcattgattacaacgttcagatgtacgcggagatcccgatgtaccgtgacactggattgaagtatcaggacacggactcatacaaggaaacggtcgagcgcatcaaggctttggacgctaaggttgtcacactgcggacagagatcgaacagtttagcgtaactaaatagtacgacgtcgtaccatgttggccgtccttcggggcggtcttttcgttgtgtacagtttgcctattaataggtttaattcttttttactgagagagagaaaggggaaggaagaacatgggagcgaacaagaaacggaagcgtcgccgcgccgagttggatgatcgtcattacctcgcgattgaattgttaacgacagttccgacgccgaacctcgatgacattgcgcgtcactgttacgttgacagacgtacgttgtaccggtggaggctgcgtaaggacttccatcgtgagttagagaaggcgcaggaacgtaagcataagcgcttacgtgtgaagctatccgaaattcgtcgggttgaggacttcgagttcatattccgcgcggttggactcatatagcggtgtaaaccggcgtgaattagagtaaaacggagatcatcgtatggttggcgcgggattcaggcgttattaaagtgtcccaaaagtgtacatacggtgcgtttttcctacaactcgcgcgtggcggacagccctccggaaacttttcgaaggggccggaataagctcgaattagagccgataatatgcggaatagtgcaaacggaggagctggcggaggtaacgcgtatgtatcgtaaacgccgggaagccgctccctgtctacgtttaggacgagttgtaactgcggtagatatattcatcatatgtggattttgtgtaagagtctacacgttaatgcggtaaagttagcgaccccaaggcccctccgattttccccgcaatcaggtacatttacaatccacgcgtcaaaataaactcctggggtctgcgagtggtagacgtcgaccactgttacgcagatatgcgccgtacaatttgcagatatacgctcctaaacggtataataacggtatcggtaagggaatagcgcgggtagttcgtagtctgtacgatggataacacgctattttgcggggtttttagtctagcgttgactgaacgttggacagagcggagacaattgcgagctggcagcgatgaggtcaggggttcgatccccctaggctccataatcaagaatgccatcacattattgtgatggcgtttttttgtgcgtgaaataaatcaaaacatgcattaattaattagaattttttggacttggggatgaatattctagatgcaaaaatagagggtttaaagtcctgactgtggagttgtcaaaaaaagtacagtttgaaaacaaggagaccctaccggctggatattgtccagtcggtagggtctccatttttctgtatacgctttcagtcagccagatattcgacgaatcttacaaagatcgtggctacttcggcacgggtggcggtggctttgggagcaaagaagttgtccggcttgcctactacaatgccggtgccccgcagcgcctgaacggcctccaacgcccaagagctgatctcactctcgtccgtgaaggacttagcgtggctttcaggcagctcatagcccttgtacttcatgtagttgtatagtatcaccagcatctgctcgcgcgtcatcggtgaattggggtcaaacaggtttgcgtttgtaccgttgactatgcctttttcggccgcccactcagctgccgcggtgtaccattgcccgtccgtcacgtcgttaaagcgggaactcgtgtagctggagaggtttacgttctcaagattggccagtacctgcacgaacattgcacgtgtcattgcggtgccgggtgagaacgttgtggacgtcgtgccgttgaaaagatcgtatgtgtaggcgaaatttatatagctgtagaaccagtcgtccatgttggcatccctgaaaggattgcccgatatcacgaggaagcccagtggggtggcgtcatcaaccgccagctccgtaccctcacggatgttcagcgacatgccgttatctaagctaacttttgcgccgctcggtcctatcacaaccgctccgccgctccgtatcttcgatccgccatggatatccacacggttgccgtttggcaggttcacatgcgcgtctttgccgcctactgtaaccgtaccgtcgctcgcgatcgtcgagcctcccgaaatggtcactgtgctgttgccgccgggtagtgtcacttcggcgctcttgtctgccggaatggttaccttaccgtttgagtctatcgttgtgccttcaggtaccttaatcttcgtcccgcctttggtcgcaatctcgccgccaccggggagggtggtgttgccgtttttgtctgtgaccgcgggcttatccttcggtgtattcactgtgtaggtcgacttcaacgttccagcgtctgtcccggtgcccgtattgtcggtgttgcccgtattaccgatgttgccggtatttccggtgtttccggtgttgcccgtattgccgccagaatcaggcacagtgggagtcgtcgtcttcatcggcgtcgtcgttgcactgatctccgcgccgtcgccctttgcattcaccgcgatgatggtgaagttgtagccttggccgtttgtcaggttcttaaaggtatatttggtctccgtcgcatccagtgtgaccggcgtcacgttgccataccataccttgtagcccaatatcgcactgccaccgtcgtcagcaggggcggtccagctcaatgtgacctgtccgtcaccggctgtcgctttgaagccgctcggagcaccgggcacgaccggttttctctgcgcgaacatccaatcaaagacgtctgtgtagtcattgttccaagctggcaagttagaggactgcgccgtgggagctatgctccaattccccatagttatctcgttgtaaagaaccgcagcttcaacttcgtgcgctatgtaatcagccagaacaggtgtgttggccggattcggcctcagattcggctgatcaaattgattgtagggccacgtaaggacctcattactctcaaagcgcgaagccctcgcgttgatcattttcggcatattgttattgataaagttattgaggttagtctggtagcctccaacattatgagcatttaaaaacatccaataggccaggttgttgtgagcgtcattgtccttagcgtttggtgaaccgcttaccggggccataggtgcggcggcagcgaagaagccagggtagctgttaactaagttgttcgtatactggccgccccaggagaagcctgctgcgtaaacacgattagggtctacttcgccgctggcaatcagggcgtctatgaccttcttaacattctcggttgagggaacagatacgccattataggaaatattcagtacatggctggcgtacttgtcaggatttttctccatttttttcattagagcgaccgagccgttggcggatttcatggccgctttttggtctgtcgcagcgtttgtaccgccgcgtgacatgccgtgagtataaacatacagcggcaatcctttgatcactttaccgtcttcatccttgtgtaggtagagcgagcgattgaccgaattgtccgtgaatgttgtaaacttgtcaaggatcggattcacaactttgtcctgttcaaaaaccacgttgcgaagtggactcccctctgtcagtacgatctctccgtttgggacgatgttgtaaacctgctttgtcgagttactgctgccatccagcgttgttttgccgccgctcgctgaataaaactcagactcaactacgatgtaacggccacttgccagtccgtcctgataatccggtgaattgcttactggccccagatagccgcgtactttcggctcgtcattagcgtatacccttgtgattttgcgtggtccttcaaaggtcactgcttcgccgttcagggttgtgttcctagccgataaggcaaacaagtccggattaagcgcggagcctaacgctgccttcccctcgcctaagtcgatgatgacagccgttgtgtactcgccactggcgaagttgtcattccatacaacaaagggaagtagccccgcgtccggatcgtttttgaatgttacgtgaatggtatggtcagcctcaatattcgaaaaggtataagtgccagcagatagagtcacggtctcgccgtctaccgttacggtatccaccattttgccggaatcgggggtaaacgtaaattctttgttagagtcccgatctactctcagaacatcgccaggtgggttcggcgttattcggccgcccggtcccgcagtggcggtgattgagaatctggtgtccacttcattggctaaagagagctgcaggctgtctgtaaaagaagcagcgctggtgtaagccgcgtccggatctccgaaactggaaacgacttcatagcggtcaccgcccttttccgttgagttattgatataaacctcaaaggtaagcttgccctcctccaaggtcaaggttcttttgggtattctcatctccacgatatatcctgtttccgtgatctgggtccatgcagctctgcccggagcggcctgccctgagaacacgcccgtcgcgctgacgcgccattggtttgagcctccggttccggtgccgacataaaactccagactgtcgtactggtgatctccgccagctccctgatatagattactgtcattcacaactactcgggaatacaggtagtcatggtcccaaaggattttggctgtgcccgtggcatggggtctgggatcggcgggcacagtgcttttgttgatgtgatgctccatggtctggccccagagtgggtcgtttgacccgagttcgggagttccaaaaatggcggtgggtgtttcattcgcttctgcgttctcgatgttgtcagtggcggcggcatagctggtaggcattagcgacgccaccattaccaagcaacagaggaacgcgagcattctgctaaatcgttttggcataaatgaaaatcctccttatttttcgatgcggtacgcccacggcttaccgcatcgtatttggacacgttgtccatatgacaagcgcccaactatatatattatgtttatcaggcgttcaatcctttaatttaaacatagagtatatttagaatgaaaacgattacttcgaagtatagggatagtgttgaagtttgcttgaattgcaataaaaaaatccaccttattaacaagatactacattgaattggaagtgttgaagatgtaatatgagaagaaatgtaagcgcattctttttttaaaaaaacgtatctctatttccttgagcgaggtggtctggttttataggtgagagatatgggttgtatgcttctgaaaattaatcgaagggaagaatgctatgcggaagcaaattacaatcctaatgttagttttacttatgaccttcagtagctggtttaatcttgttctgccatttagcaatcaagcttcagcggacacaataacaccaacgatgttggcgcattatccattgcttgaggatgtacaggatatatcaggtaatgaaaagcatggaacggccgtaggagacattacttacaccgatggtctcactttacctgggggaacagatagtaatacaaactacgttcagcttcctactggtttgtttgataatcaagaaaatacaacgatatctgtatggatcaagagcaacactggaagtgggaactactcagcattattctacggtactccagcagctggcaataacttgccaacgaattactggatgtttaatccatcgaatccaagtggtgattttaagtcagtatttacgaataacaataatgttgaccagccttggacgactgaggtaggggtatcaggcacttctacgtcacagtacgaaggtcaatgggttcactatacgacggtcattacagaacgctctattacaggttacattaacggtgtaagtataggcacgaccgccaaagagaaaacaacagcaagttttggtactgatttgcatgcttacatcggtcgctccaattatttaggggatgctacttttgcaggcagctttcaagatttaagaatttacggagaggcactagataatgaagatatcgctgtagtatatgaacaatcgtttaatgaaaagcaaatacaacaaggcaaaatagagctaacgttaggtgatatatcggcagttacagaatctcttgaactgcctactcaagataagaatggcgcaatgatctcatggacttctagtgatgagagtgcgattagtgcaaccggggaagtgttcttacgagaaatggagcaacaagtgacgttaactgcaaccatttctttaggtggaagccaggcaacgaaggagtttattgttaccttactacctaaggatgactctattgagcagattgccgttaagaatgtcttgcttaatgaacctacatttattttatcagcgggggacagcgagatattagtagctactatttcaccttcaaatgcaacaaataaaagagttatctgggcatctagtgactccagtgtagcgattgtcaattcaacgggtaaagttacagctgttagtgaaggtacagccacaattacggtacagactgaagatggagagtttacagctacatcagccgttaccgttaagggaaaatcgctaaaagatgatcttattcttcattacaacatgaagacgactgaagaagtagacggtcaactcgtactgaaggatgttgccaacaaggcagttacatttgacggaatatttagaaatccaaacaatggacaattcatttcaaacagtgaggttggctttgtttccttcaatggtggaagctctatatctattagtgggcatgttgagattcctaagggctcaaatggactagatctactacacggtctgaatgagattacagtatcttcaatcgtgaactggacgaatgatgggacgaatcgctggatcttcggtttgggtactgtattaacaccagaaacgaacaaatatttcttcgtaacaccacgtcacggtagtggatcaggtaatatgattgccacaggtatctctaaaaatggctggccgaacgaagcattagttacaggtagcgcaaactcaaaccttatcggtgggcagtggaagcatgtaacggtgtccttgtccgaagctagcaataggataacgttattcgtggatggagctaaggttgcttcgggtaatgcaaagggactaaagctgtcagaaattattaatccggatgctactttctctggctttatcggtaaatcaatcttctcaaacgatccataccttcaaggtagcgtagctgattttcgagtatatgatcgcgcgttgacagaccaagaagtaggcgagttatatcaacaagaaggagcaactcacatctcaaaaatacgtcagctgactgttgatgatgcagcgaatcaactcaacatcagtcgttacttaggtgaaggcgataaaagcaccgataagataacaagaaacgttacattaccgacaagcggtaaaaacggcgtgagcattacttggagttccagtcatcctactgtcatttctaaccatggcactgtacaacgtccagctgttcaagcagataatgttcaggcagagcttacggctactttaacgtatcaaggagtatcaactacagctgtattccctgttacgatcttgaagcaattcgatgatcagcagaaggttgatctggacgctgaacaaatagagatctacaatgctgagaacgttaaaggtaacttacgtcttgttgctacaggtgaacaaggctccacaattacatgggtatctagcagaccggcagttgtgaaaggaacggctgaagcggctggtaacgctacacagctaggctgggtaagccgtcaagctatggatacgcccgttacgctaatagctacaattacgaatggtgcagcttctaaacagcttacgtttaacgttacgattaaacaagcaactgcgccagtgcagcatgatgcttacttttttgcgtactttacaggtgaatatgagggtggtgaagagatatccttcgctacagctgaagatccattgttctggaaagggttgaataacggtaagtcgatccttcaatctgatatgggtgaaaaaggacttcgggatccattcgttatacggtctccagaaggggataaattctatatgctggcaaccgatttgaagatgggtgaaagtacaaatttcgaccaagctcaaattacgggtagtcattacatgatgatttgggagtcggaggatctcgttcattggagcgagcaacgtatgatcgaggttgctcctaagactggaggaaatacgtgggcaccagaagctatctatgatccagtaactggagagtatatcgtattttgggcatcatcgatgaaaaacacagagacatatggtgattataacggaagacctgcaggtcagtacaatgtgatgtactacgcaacaacaagagacttctacaacttctctgagccaaaggtcatgattgatgagtcacttccgacaattgatacgacgtttattgagcataatgatatgttgtaccgattcaccaaatcagaagtgaatactaaagtgtatgtggagaaagcaccaactttttattatgacaaggacggtattgcagcaaacggccttcaatacgacgctgttccgggtacacgtgataataaacttggcttgatcggaaataatggaaacaacgaagggcagacgatttttaaagataataataaagacaaatggtatctgttccttgattcatggccatatcatgttcgatatacaacagatctggatagtagcacgcaatatctgaacaatgtattaagtagtgataaatatgcactgccgccaggaccacgacacgggacggtaattccaatctcacgtgcagagtattatgctttgcaagagaagtatgcatggaaaggtccggcaccatcaacagacccggttgtacattactcattcgatgcaaatacagtgaatggtacaacggtgaatgatatttctggcaacggtcatcacgcaacactagtaggtggagcaacgatcaatgaagaggatcgcattggtaaaacgggtggtgcactagagcttaatggatcaacaggatatgtgaagctgccagataacttgattcaatccttgaatcttgagaaggctacgttctctacatgggttcaaatggacagaaatcaagcaaatcaaagaatatttgattttgcttccgacacaggcagacaggttaaccgcaacaccatgtacttgagcacacaaggtgatacaggtagtctagagtttgctgtggtaacaccttttacagagaaatttagcaatgacagcacgcgactgggatcagaatataaatatgcggtgagaaattccgggttattaccaacgaagacttggcagcatgttgcaattacaatggatgaatttgatgccgtattgtatgtgaatggtcaagaggttaaacgtagctcgacatttaacgttgagccgagaatgttactggaaacaacgatgaattatattggtaaatcgagaaacagctctcatagtttatttgatggtaaatttgatgatttccgtatttataatcgtgcattatccgttgaagagattgcaacattagctgatgaagacgttactcctccagtagagcagccatctggggcagagctcattcttcactacaacatggatgatattgatggtgcaacggttattgaccaaacaggaaacttcaatggaaaatggatgaatccgtctaaagcagaatggattcgtacacaagatgctggtgtactaagctttactggtggcacaactaactcttatgtagaactgccacaaggagttctcgatggattaacggatatgaccgtttcatccattgtgaactggagcggtaaaaacgctgccgagtggttatatgcattaggaagaccagacaataatacgcactatacgtacttcacaccacgttataacgctaacggtctagctcgccttggtatcgcgacgaatgcttggaataatgagtcttcaacttctaccacaggcttaaagaataatgaatggaaagtcgttacgactgttgtttcaggcacggatggtacactaacgctttatatcgatggtgttgctgttgcatcaggctcaacgaatggaatgacactagaacaaataaaaaatacttcaggcagtagtggaaccatcggtaagtcattctatacagctgatccatacttcggcgggttgattgcagacttccaaatctatgatggtgctatgactgcggcagatattacatcacttaaggctcatgcagatcagaagattgctttgatggcgggcatgcttgtatcggctgcgacagagaaattaacgattcatgatcttcttgcttctaatgcatcaaaagatgcgattataagcaatgtaacattgccaacatcaggtgcttatggcacaacaataagctggacttcagataaggggaatgtcatctcaactacaggtgtcgtaactagaccagctaacgcaacaggtgatcaagttgtaacgttaacagcagtatttacagatggtacagagacagttaacaaaacttttcagttgacggttaaggcattgccaaacgatgtcacttctgtagatgaagcaaaagcagcactagtcgttcataacattaatgatgtaagaggtcatatatcattaccaacatctggactatatggaacaacgattacttgggcttctgctcaaccaaacgttgtttcagttactggagaagtaaaacgtccggcacacggtagtggaaatgtagacgtgaagcttacagctacgattacattaaattcagcatccactacgaaggaattcattgcgaaggtgaaggaattgcctgctgatgaaaaatatgcgggatactttttcacatatttcactggagaaggtaccgcaacaggggagcaagtatactttgcactaagtaacggtaatgatccgttgaactggcgagaattgaataatggtaaacctgtattgacctctaccttaggggagaagggggtacgtgatccgttcattattcgttcgcctgaaggtgataagttctacatgatcgctaccgatctgaaaattaacggcaatggtaactggggcagagcacacacatggggcagtcgttccattatggtttgggaatcgaatgatctagtcaattggacagatcaacgcatggtagaggttgcaccggaagaagcgggtaatacatgggcaccagaaattatgtacgacaacacaacaggtgaatatatcgtattttgggcatcaagaatgtttgatgacgcatcccatacaggcgatgcttatcaaaaaatgatgtatagcaagacaagagatttctatacgtttactgaaccgcaagtatatttggattatggatattcaatcattgacacaacgatgattgagcatgaaggaaaagtgtatcgctttacgaaagatgagcaaaacaacggagcttctgctccatttggcaagatgatcttccaagaggtgggtgactcgatcttagatccaaccttcaagatgattaatcaaggcgttggtaacatcaaatgggttgagggtccaacgatcttcaaatcgaatacagatgaaaaatggtatttattcgtagatgagtttggtggaagaggttatgttccattcgagacaacaaatcttgcatcagatgtctggacattatcttctaactacaacttaccagctagtccgcgtcacggaacggtaattccaattacacaaagtgagtatgatgcactcaacgggaagaacgtacccgttagcggaattagcttggacaaaacgacgttgtccatcgtagaaggtcaatcagggcaattgacagctacggtaacaccagctaatgcaacgaaaaaagcagtaacatggagctctagcaatacagctgtagcgactgtaagtgcgacaggtcaagtaacagcggtggcaccaggaacagcaaggattacagtaactacagtggatggtggtttatcatcaagcgctacggtaacggtaacaccattggttgatggaacaccacaagcaccaaacagtggtaatggaaatggtggcgttgacggtaacattcctgcacctacagtaccaacagctccaggtggaaatgagccagtggtcatagacaacggccaaataaacattaaaccagttgtaaatgagagcggtacttctgaagtgaagttaagtgcggatacaatgaagcgtgcgcttgatcaaacgacaggcggtaagttacacatgcaagttgaagctgatgcaagcttgaacgggctaacgatggagctcgcagtagatgcgcgcttaacaagtggatcttctacggtagatcgcatcgagatcaacataggctctgcagttgtaacagtggcaaccgaactgcttggaacaggaacaagtgcagggaaaacgttaggattgtcgattaagaaaattgcagctaatcaactgccagctggcgcacaagctcagctgaacggtgaggtcgtatacgatatcgagctaacgattgatggtaagaaacttacacagtttgatggcagagatgatctcgtgattgaattgccatacacactaaaggctaacgaaaatccaaacaacgtcgtagtatacgatgtgaaggacaacggagagctaagagtcgtgacgaatggtaaatacaatgcagcgacaggaaaagtagagttcaagccaacgtatctgagcaagtatacggtagcgtatgttgcaacgagctttaaggatgtgactcaagactgggcgaaggatgcgatctcagcattgggggcaagaggcattgtgaagggtgtaggtgacggcgagtttaatccgaatggtcaagtgacaagagcagaattcatcaccatgctgatgaagttgtttgagctatcggatgagagcgcaacgacaagctttagtgatgtgaagcaaggagaatggtaccatggaaatatcgcaaccgcgcagaagctggggattgtgaacgggaaaccagatggacgattcggagttcatgagaacattacgcgagaagatatggcggttatggtatacaaggcgatccaaattaagcaactagcgttagcaagtggtgaagctacagccttcaaggatgaagcaaacatcgcaagttatgcgaagcaagcggtagaggcaatacagggagcaggcataataaacggtgtaggtaacgatgagtttgcaccgaaaaagaatgctagccgtgcagaagcagcagtgatgatctataatttgttgggtttgatgtagacacattaagtatagagcaacgccatcacattacgtgatggcgtttttatttggaatactggggaactcagtgtacaaggaagagtttttgttgtctattcagaggtacgcgctttttgccttgtctcaattaatttgaatacgtcatccacgtcgagggaaaacatcatgctcttgctcgttatcggctggaagtggaattccagcttttctttgccgaattgcttctctaactccgtccactgctccgttgacaataatagaaatgccaacgtgtcactgcccagggattccataaaccatcgaatctgatattggggagcgatcatctcctccatagcccgaacggcactgtcccgatcagtccaatcatcggcgaacggaatcgtcagcgtacgctcgtccgaacttaacacgatatcgacgccccttggtttgtcgatttggataattttacactgaatttggtgagattccggcagttggccgttaaagtaatggatgatatctccctcgtcttctctccaatcaatccagattaacgactcgtactctaaaaactgttctatgacgtcttcatcggacgaatgtttcaagacatggataatcggttgaagcgtactcattgtcatcccatcccttatataaagttgatatatactctatattatcctataagatgatcagttctgaatagggcaacagacatactgcttttcggaaatagaactactctcatctttcaattcgatgttatgataatggagagttgtcttttaagtttaatttttaaaaataggagcatgtcaattatacatatggaggtaataacgtttgagtactcactattatttcagttggtttaatgatttttttccagaaaagctggtcgggcggttacatgaggatatcacagatagaaaatcgcttgtgatgataagcgctaagccttctgattatgaaggagagcaagtgaactttgaggatattacggaatggacttggttaacgcaggctaaccttagttttgatgaatatcacttcattgattatcgtatgcagaaagaagaggctcatcagttgattcggaacgcttctgtcatttttatgtgtggaggatatcctgttcagcagcacgagtttttggcggaatatgaactatccgatattattaagaacagtaacgccgttatcctcggtgcaagtgccggtgcattaaatatggctgcaaaatggatatcttcggctgatactaatcctaaggatgaaacaactacgttttatgagggtctgagctttaatcattttgcctatgaatctcatgctagacgcgactacagcacgtttgttaaaggatacctgtttccactatctgaacagatgaatgtttatgcggcagagcaggagagtgctattcgtgtaaaggatggtaaaatggatatcttaggccctgtatatttaatttctgaatctaaaattcagaaattgatggaaacgctctgatatacatacggtttgtaaacagctgcagagaatgagcatttttagaccgccttcaatggcggtttttttagctttaaaggttttggatgctcctagggaatcaaaaaaatctgggtataacagcgataggaaagttattctgtcatctgagtgacctgtgtaaaaaggaaaaattagcttgttgcctctaccatctttttcggaaatgtagccaatcaacaatctcataactttaccctgatatcggatggatttttcccctaagattatcggtataggccagatttccatccgtcgtgattacggcagcctcgatatccttcatattattaactttatgaataatggagaccgcatctaacccaaataattctgtagtatatatatcgcagtcgagcgatctatccgcaataatcgttaaagaagcgatattactttcgattggatagcctgttccgctgttaaatatatgatggtactgaccccctttcttctctaaaactctctcgtatattcctgatgtaacgacggattgctcccgtatactaacgagtgctgctgcatttcctctaggtaaaaagggattttgaattccaaccttccagtgactggacccggtgggagaatcgccatgaaccaaaacattgccgcccatatcgaccatagctgatgcagctccgtttttcttgaaaaatgacataacttgatcagcaaaataacctttagcgatcgctccaaggtcgatttccatgccttttttgaataaatggaccgtttgtagctcatcgtcaagctgtatatgctccggattcaagagctccagcaccgctttaatctcggtatcctccggcacatgtgcctcgcgaaaaccaattctccacaatttgatcaaaggccctatcgcaatatttaaaaatgaatcttttttcaggctgtgttctttgcctatcttaataagatcatacagttccttgtctactctaagcggatgtgatgtggcttctttttttagcatggcaagctgcgattgctcactgttggcactgaacacttgttcataatggacaagcatattcacggcttcctcggcaagctcttcagcatctgtcccctcgatatagagggatatgttcgttcccataagtggtatcgttctcgtaaaaggtttcatgatagcctcctatattgcacattgttgtccgtgattgagaaaagtatggatgaggtcatgatccacgctatgcagctttttttctccatgatgggctataaaataatccagactcatcttctctacagggattggatagatgttgtattccgaagggcactccttgatatggatactttcaggcacaaaggtcagacctaaattatgctttgccagcttcagtaccgtgtagatttcattgctctccataacgatattaggctgcaccttgtagacactgagcaattgatcaatctgttttcggattgccgaacctttggacgttagaataagcttttgattcaaaatggtgctgatctcaatcgtgccctccgggatgactgcaacattctcttgatataattcgcagcaacgcggaatgatggcctggtaactgtgcctgccccagttaaacgagttcaagttaggggagatactgcttgaattttgcccgatccagaagtccagctcattattttggagacgtttctcatttttttcaggtaaatcctcgacaagattaattttataagcaggatgaagctcgagaaaatctggtaaaaaaaggggcgttaagtacacaccaaggctcggaagaatgccgatccgtatcaccttattgccaatatccgatacatatgagatttccctaataagcttggcgtagctgttttcgagtgaagttaagtattgataatatattttcccctgctcggttaatcggtacggaagtttgttgcgagtgattagctcacagcccaactcaatttcgatttttttgataacctttgtgaggtagggctgagatatgtaaagggattgtgcggccctgctatagttgctgtattttaataggctgtcaatgtaacacaagatatcttgagattctaacttagacatgttcctcaccccttgtgaaaaaagtaacaaacttttaatttgaggtgattataacaaattagttatcaaactgcaatgaataactattagatcatttgagctttgatatgttagagttaggccgaaagattgagcctgacagttacgaacatcatctcgaatgacagagaggggattacgatgaactatttagctatcgtgggcacgaattcggatgtgtcaacgaaccggacgctacttcaatttatgcaaaagcattttgctagtgaggcccagattaacttgtttgaaattaaggatttgcctgcttttattgaaaaagatgaattagaggatgctgaagttgatattcctgtgaaggtacaagacttattagatcaaatctctaaagcgaatggtgtcattatcgctactcctgagtatgatcatgcgatccctgccgtgttgaaaagtgcgctggaatggatcagttacacgactcaaaccttgaaagacaagcctgtactgattgtgggtgcttcacatggtgcactcggttcttccagggcacaagcgcatcttagacaaatcctggactcacctgagcttggtgcgagaatgatgcctagtagcgagtttcttttgggaaaatcacagagtgcatttgatagcagtggtaatctcattgacgctgacaaagtagcggagcttgacgaaatcttcaatgagtttattttgtttactgagatcactacggaactgttatcaaaaaggacgttgaagaaaaaaacgaaaaaattttcctggcaagagtagggggccaatcacaatgaaaatcatagcgatcgttggcacaaatgcaaagaaatcgtataatcgcaagctgcttcaattcatacaaaagcattttgagtccagagcagccattgaaatcctcgatattacagatgttccgatgtttaatcagtccgataaccaaacaaacagtgcaattatacaatcgtttaatgaaaaaattatggcaagtgatggtgtcattattgcgactccagaatataaccattccatcccttcatcccttaaaagcctgctggaatggttgagctttgaaatccatccgctggctggaaaacccgtgatgatcataggtgcgtcacagggaacacaaggttcctcgcgtgcacagctgcatcttcgtcaaatcctggatgcaccaggtgtcgaagctaacgtgatgccagggtatgagtttttgcttggaagtgcacataaagcatttgacgaatcaggtaacctgaacaatgaaggaacgatcgatttcctggaaacatgtttcctgcggttccttcggtttgccaaaatttcaaatcagctcaacgaagaagaggagtttacctatagacccggtgtgtataagatcaatgccataggtcacagtggcaatctgccgatgaaggtttcctttagtgaaaatagaattgaaagtatcgatatcgattcgaagggtgaaaccgaaggcatcgcggatgttgtttttataagaattccgaataaaatcattgagggacagacgctgaatgtagatgctctctcaggtgcttctgaaaccagtaatgctgtcatcaatggtgtagccaaagcggttaagcttgccggagttaacccggatattctgaaaagacgtccaaaacctgctagcagccagatgaaagatgacgaagaatacacttgcgatgtggtcgttgtaggtggaggtggcgcaggactcagtgctgctgctacagctttacaacaaggagcaagtgtgattgtacttgagaaatatcctgctgttgggggaaatacgatccgctcaggtggtcctgtcaatgctgcagatcctgtatggcaacaacagttcactgagaatccaggggaaagacagacgattgagaatttattaaataccgatgagagcttgatccatccagaatatgtagatgattttcatgcactcaaagaagagtttactgcgtatcaggataagttcggcacagaaaaggcttatttattcgactccccacttcttcacagaatgcaaacgtattttgggggcaaacgtgcagacctgaatgggagcatgatctatggacaatacgatctggtcaaagtacttacagaccgtgccttggaaagtgtgcaatggcttgaggaaatcggtgttgaatacgataaaagcatcgtgtttgctccagtgggtgccctttggcgccgtggtcataaacctgtgaaaagttatggctctgcatttatcattgcacttagcaaatatgtagaagagaataaggggaaaattattacagatagcccggtcaaacaactgatcatcgaagatggagaaataacaggtgtcatcgcaaccggagttaacggacagaaaattactattcatgcaaaagcggttgttcttgctagtggcggttttggtgcaaatactcagatgctcaaggaatataacacatactggagccatattgacgatgatatcaaaacaacaaattcctatgcgatgactggtgatggaatatcgcttggtaagagtgcaggagcagcactgacaggcatgggcttcactcaaatgatgccggtagccgatccggatacgggcgaactcttcagtggactgcaagtacctcctgaaaactttgtcattgttaacaaaaagggagaacgatttgttaatgaattctctggaagagatgtcttaaccaaagctgctatcgagcagggaagtttattttacctgatcgcggatgacgagatcaagaaaaccgcagcgaacacaagccaggaaaagatagaccgtcaagtcgaagcaggtaccttgttcagagccgacaccatagaagaattggcagtgaaaatcaatatggaccctgaagttcttagaaatacgattgataagtataacttatatgtggatgcgggctttgatccggagttccataaggatacgtttagcttaaaagtcgaacaagctccattttatgccacacctagaaaaccggcggttcaccataccatgggcggaattaagatcgacacccaaacccgcgtattggatgaaaacggtcagccgattgcacatctgtatgccgctggggaagttgcaggaggtatacatgcaggcaaccgtttaggcggtaatgccttgacggatatatttactttcggacgtatcgctggtaagactgctgttgatgagatgaatgattagaatgtaaaataagaaatatagatcactccaggtttcccatatgtaaagaacccgcttaacacaaggattttcgagtgttaagcgggttttttcgatgtggaaatggtttggttttgtggtcgtggtaatacgaatgttctcagaccccaaaccaagcccggtgaagggcatatacaccttctgtaatatcctcaatactcaatccaccaaaaccaatctgaaccatggattgctccgcttgagctggttgcgcccaaaagggggataccgggtagacctgaacaccttccttctcagcagtagcaatcagcttgtgttcatccattccgttatgtacacgcaacaaaatatgaagtcctgcatcctcaccaatgatggtaacttgagcacccatcatcttctgaatcattgaaataagtgtgaattgcttctgtcgatataccttcctcatcttgcgaatgtgggcttcccaatgtccattactcataaacagctctaaggtgttctgctgaaaatgagagaccgtttgatcatataatcggtagtcttgtttacggtgtagctctaccatggcatgtggtagaaccatatacgcaatacgtaatgaaggaagaaggcactttgaaaatgtccccaggtaaacggttcgctgttgagtatccaggctttgcagggaaggtatcggtttgccgacatatctgaactcactatcataatcgtcctcaataatgatcccattctgatctgttgcccatttcagtaattgcattctcttggccagcggcatgaccattccataggggaactgatgtgacggtgtaatgtagacgatgcgggaattgcttttgtataacttatggatatgaagtccatctgcttccagcggaatcgggtgaatgtttagacctttatgttgaaaaaccgtccgaacaccgtcatatcccgggtcttccatcgcgataccatgactaacgttacctattaatccagataacacaccgagcaggtattgaacaccagctccaattataatttgatcaggtgaacaatttactcccctagagctgtgcaggtaatttgcaatttcagatcgaagtcccggttctccaagaggatcgccataagagaacaacttcatttggttctggagcaagctctgattggataacttgcgccaagtagcaaatggaaaatgctcagcatctacgtcaccataacgaaaattgtatcgaatctcagggctatcctgaatactgttttccaaccaatttttactcactacatgggacaggggcaatgcttccagcttcaaatccattatgtataagccactccttggcctgctctggacataaccttcggctaataactgttgataggccatatcgactgtattacggctaatgtggaggtggctggatagtgaacgaatagagggaagacgactatcggctggtaactttccgttcaaaatatctttcttaatatagtgataaagctgagcgtataacggatctccagactctctgttcaacaataatgtcaaatcaatcatgctaatcctcctcgttgccagaactgaccctatgattttgttgagagttgtcactacttatggggtcaatcgatggttacaattatatcagttccggtcgaattgaaaagatatcagtgcactggattactattgttgtaggaggagaaggaatgaacaaacctatagatgttatggaacgaatagaaaatccgtcaacaaaagcggtggaaaacttcaatcaacaccctggtttccgccgtatgtttgccccagaccaattaacaatagggctgttcttaccatttaaattctataaaggacacatggatgttctaaaaggtcaagctgacctcgtggaaagcattgatcaatgcaattttgcagccgtatgggtgcgagatgtccctttatttgatcccggctttggagatgctggacaagtatttgacccatttgtctatctagcctatcttgctgcaagaaccaaaaacgtctccctagtaacaggaagcgcgatcttcacgcttcgccatccgattgatttagccaaggcagctacatccattgatgtactctcgggcggacgacttgtgttagggattgcttctggcgaccgacctgctgagtttccggcatatgggatagatggggagcatcgtgatgtgcgattccgggagacggtggagtttttccgtgagcttatacaggatagaactggcgcaattcaatcttctcttggtcaattgaaagggcttgaattactcccgaaaccagcagctggtggtattccgctcgttgtgacaggctcaagcaggcagtctttagattggattgcgaagaacagtgacggctggcttacgtatcccgaagcaacggcaaacgaatctggtcctcagatgcttgcccataagattagtgcctggcgtgaaaaaatacctaatggcatgttcaagccgcatatgaccaacgaatggattgatcttgtggaagatgtcaattatccgcgaacaccgcttcgtggcgggtacatattacgtacaggtcgggcaggtttaattcagcttttggaggaatggcgaacagtcggcgttaatcatgctgcactaggcattcatttttcgagtcggcctcctgctgaggtgattcaggagttagcagaggaagtattgccgctctttcccacacatgtgggtccgaagccgttgtttacagggtggtagagcataaaattattgcctgatgacacagatggcttttctccgcatttctgttaatgatcagaagaggatcgatccgctgacagcggtaaggtcaggggttcgatcccctaggtaccataacgaaaaagacgtcattacgaaatatattttggcgttttttttcgttatggattgttcaggtagcgaatgcgtagcttagtccgcgtgcgtgcatgaagctgtaaatcgactcgatacagcagatcagggatgatgccaaaggtatgacatatttttatgtaaacgctttaattaaatatagacaagggatgccgacggtgataatattgtttctgtaagaaactatattgttcttatcaaatataattataaggacttcattcttaagtacacgaataacgccctgtgctaaagaattttaattgtttggtgcttgagcgtaacgagagggatgggaaatattatgagtataattgaaacaacaatcgaatcttttgacggtactcggctatattctagtaaaaatttagttagtgatgcaaaagccgctgtcgttattgtacacggactagctgagcatgcagggcgctacgattatttgacagagaagctgaatcagcgcgggtttagggtatatcggtttgaccatcgtggtcatgccagatccgagggacaacgtacgttttataaagagtttgatcatcttattgaagatgttcatgtcattatcgattcggcattgcaagagagcggcgatcttccgctgtttgtgatcgggcatagtatgggcggttttgcaacttcatcctttggaacgaaatatccaggcaaggtcaagggcatcgtactatccggagcgctcactcgttacaatacaaaagttgccggagaactgccgatggaacttcctacaggcacgtatttcccgaatgagctgggcagcggcgtatgtagtgatcccgcagttgtatccgcttacgccaatgacccactggttgaaaaacagatctctgtagatttatttaatagtctgggaaatggaataacatggctcaaggagaacgccaagcagtttacagatcccgtgcttgtactgcatggggccaatgatggactggtcagcgaaaaggattcccgtgacttttacggcgatatcgcttcaacggataaaacactcaaaatttatgctcatctgatgcatgaaatatttaatgaaccgactcgtgatgatgttattgaagaagcaattacatggattgaaaaacggatctgatttcagtagagtaagagagagaatctgaatatgaaagggattacgcatgaaattagattggatgggcgaccatcgggaactgattgagaaaattatcaaatacggtaatgcgtactcaaacacgtataagctgcagcgaagttatggtacagacatgatgttctcggcttcacagattcagacgctggaatacattctggaagccgaggacaaggaagaaaagatgtcggagatggccgcacgcctgggcgtaagccgcagtacattttccaagaacgtgaagaatctgacggaaaaaggtctactcgaaaaatttcatttaagcggcaaccgcaaagacatttacgtcaaaccttctgagaaaggtcgcgaggtatatgcgaagtataccgaatttgtaagggaactttgctttgatgagattttcaagtatgcagatcagatttcagaagcggataagcagaactttgttcgcatcatggatctgtttgccgacgtgctcgtctggtatggtgaaaaagaacaggaagcgcgcaagttaatcagaattgattcctctgaaacatgaaccttgaaattaagggcaacagcccattccctccgcgaatgtccgtcatacagtataaagtgcttgatgcagcagaggctgtaggacaattattcagcagggagtgggacgtgtgaaatcatcaacaaagcttaccggacgggttatttataaaggagatccgggatatgaagcggcgcgcaagaactgggacccgcataccgacaaatatcctaaagtttttgtttttgcccaaaagacgaaagatgtatccaacgctatccgatgggctcgtgaaaataatgtaccgatcaggccgcggagcggcagacatgcgcttgaagtgaatctttcccaggttaacggtggaattgtcattgatgtaagtgatctgaattccatcaaacttgataaaaaaaatggaaccgttgttgtgggtacgggtaaccgagtagggagaattgcgaatacccttgccaaacaaggattcatagctccttttggtgacagccctactgtagggatcggtggaattacgttaggtgggggaattgggcctctccagcgtaccatcggtctcatcagtgataacctgcttgaggtagagatggtggacgccaaaggaaaagtgattcgggctaataaaaatcgtaattcggatctcttttgggcctcgcggggaggaggcggcggtaacttcggagtatacacccgttacaaattcaaagtgcgccgggctccagcgaaggcgactgtatttaaaatcacctggccatgggctcaattcgaaaaggtgctcaaagtatggcagaggtgggctccctctgtggatacaagactgggcagcgagttgtccatcggaccgaaaaagggtggcaatgttgtcatggaggggctgttcctagggtcaaaaacagaggcactccgtctattgcagccgattacgagtgttggcacaccgacaagttccattgttcgtttgttaccttacacggaagttgtgaagtttttattacaacctgatccgaccgagactcaacggtatagcaaccagttctcgtccggttttggacgaaaaccattccccgacaaagccattaaatcgatgcgaacatttttggagaacctggaagaggggccaggcggattctatttcctcaactggggcggagcagtaagtcgcaaatcacctagatcaaccgccttcttctggcgtaaagagaagttctatgtggaatggaccagtacgtggctcaaaccatcccatgccgccaaaaatatcgcactcgctcgtaatactcgcaagaaattgcaaccatacattgtgggttcctatatcaacgttccagaccaagggatcaaaaattccggtccagtgtactatggagccaactatgccagactgcggagagtcaaagccaagtatgacccgaaaaatgtgtttaacaatccgcaaagcattactccggctcggatagtgtagtccatgttcacttgtttaatacctcttcaatgagtgaagaaaacacgccttaattggcgtgttttttgttgaagtgaacttattttcaaaaggaaactaaaaagccgccctcggtcatatgaccaagagcggcttcttcacatgttaaatacgcacggcagttaaagcgctgttaagctttaacttgttctccagcaaagacttcaacgttcattggagcggccatgaatgctgctgcttgttgaacaaaagcttggaaatgcgcgcttgtgttgtgggaagctgtagcagcttcatctttccacagctcgatcatcgtgtattgttgttcgcgttctgtgcttttcgccaaatcgtagctgatgttaccttcttcttgacgtgtagcagccatcagttctttcgcagctgcgaggaatgcttgctcttggtccggtttaacttgcagatgagcgtgaatgataatcataatgtataacctccatattgtgtttgtttggaatgtgttaagaaaggggaaaccgtccctgatattatgcccaagttgtgattgtttctacaggcaggcggtaggatgggtgaccttctttggccgatttaccgatcgagatcaacataaccgcttgataacgctctttgtccatgccaaatgcttctgcgatttggtctttttcgtaaccaccgattgggttagtatcataaccgtgagcacgtgctacaagcattaattgcatggaagcaagtccagcgtcgatcatattaacttcgcgaatagcggaagcaggcatattttcataataaggcaatacttttgatagttgcatatctttaacttcttgtggcatataaccgagttctacagctttaccaaaaatttcttccatatgttccgcgtttttcatgtcaatgaataccccaatgactgcggaggaagtcaacacttgattttgattgaatctcgcaagtggagcaagcttttctttaccttcagtcgtatctacaaccagaaaacgccaaggctgcaaattgatcgaagatggtgcacgggaagcttctgacagaatttcagtcatttcttcacggctaattttcacttcaggatcgtaaagtttaacagaacgacgaccgtaggtgatttcgttaaaatcattggttttttggaatttgctttgaattgtactcatgcatggatctctcctctatatatgggtttagaaattgttctgcatacgttccaggaaatcggcgagtgattgaacttcgtcttcactgaaatcctgtaaaatctggttgataaaattggtcttctcagctttgtagccttcaatctgcttccgaccgtggtccgtcaaacgaacaaaagtgacccgattatcatcgggattcttacgtcttgtaaccatcaggtccgcctcaagctgtttcaagtggcgtgtaatcgcagcactatcaatgttaatgattttctgcagcatggattggttaatctcatcgacctgatccagctcatgcagaatttcaaagcgagaggaactgatacctgtacagcgttcgaacttgggactgagtttgttacccaacacgttcaacagattaatgatttgttcttctttggaaacaatacgtgtcatgactagacctcccgggtgaatctgaatcatgaacaacggcgtatgttaaccaatgattaatgttgcagtatacaatgccattgcctaatgattatttggatgctctcgaatcattgatgtatcaatatttgatgcgtcaatcattgatggctcaattaatatatcatgccttttatgattttgcaacaggttagaaaatgttgctgattctagcgttattatcccgctacgtatacattgcagtccaaatatgttgtccaaatggataagttaatattgattgtgcatgttattgagaattgttatcaattgatttataatgaaatgaaatatacatactgagcgaaaattacaggctcttcataaagaatagcaagaaggtatgtcgatgtaatatggcgggagggaaagtacagcggatatgaatttgaatgatcacatcaggttgtggaatcatgcttttgtcaaaatactggatgtacgccaaaacgctttgcatcctggggagaagttgaagaattatcaactaccagcaagtacctatttatatatcaccgacggaagtgcacggatacgaatggatcaacacagatacatcgtggagggattccacatcattcatggtggcaagcaggcgtatttaaacatggagacggattcgggcgtggcgtattatatgattttgtacaaagccatcctagccttgccctgtgggatggaaattcagtgtctgatggaccatgaacgtccgtttcaggaccaatatgcacttgtaccaacccgtccactacatatgtatcagtgtatggaggaattgaagcaggagtgggagcagtctaccaagcttgcaaagttacatgccaaaaccttatttcatcaatgggtatatcttttattgacagacttacacgaacaatccattcagccacataaaccggatacggtcacacaggctattgaatatatgaatgctcatctccatgagcccatagctcttgacgtaatggcagaagcaatggaatgcagtgtggggcacttgtcgaggctgttcaaacaaaagttaaacatcagtcccatccagtatcttggacagattcgaatggagagggccgcacatcttctggtgcataccagtgctacgctgcaacagattgcagaacagatcggctatccggatgcacattcactgagccgcagtttcaaaaaaataaaaggcctttctccaattcgctacaaaaaaggagtaagccaacggttaaacaagtcgaaacagccaatggtattgaacaacaagcaagatttgcccagtgtaatgcaagaaaatgcccttctttcgttacattcccatctatataatgatattgattatcaatatcaaaagaatgttggaggggaatcaataatgcaaggaaaattcaaaatgacagcactaagcatgatgttgtgtctcacgctattgctcacggcctgttccagtccagcaccgtctgcaagtggtacgcaaacagagaccaatgcggctactacacaatcgggtaaccaggcaacggaggcagggaaatcgactgcacagccggagacgcggaccgtctctacaatgaggggagatgtggtaatcccggccaatccgcagcgtgttgcttcagatcaatatatggggtacctgctgaaactgggcatagtaccggttggtgtaagaacatttatgctgaacgaaggatggattgaaaagtctggcattgctgctgatgttatagcgggtattgaggatttgggaggagagttcccaatgaatctggagaagttagtgtcacttgagccggatctcatcatcggttccattgataaaaatattgaggattacgaaaaaattgcaacgaccgtctttttaccttattgggaaggcgataaaacttctggtccactggaaaagctgcgccggattgctggtgtttttggaaaagagaaggaagcagagcaatggatcacgacatatgaagagaatatcgaagagactaagaagcagattgatggtgtaattaaagaaggcgagactgtatccatcatacaaatagggtacaaagcgttgtatgtacttggtgcagaaggcgggaactatggtagttccacgatctatgagatgctgaaactgcctccaactcagcaagcactcgaaatgaaggatggattcgagacgatctcccttgaagtactgcctgagtatatgggagatcatatcttcttatatggttcgggtagtgaggacgccaaagagatcctgaacagcgaggtttggaaacgtctgcctgctgtgcagaaaggacaagtctacacctatggttccttggatggtacagaggatgagttcgtcatggaagatccctattcactggagttgcagttggatagtataaagaatttactattgggagctgaaaaatagagtgtaatcagttcacatagaatcggatcagaacagggaggggacgtgagcatggaggaaaatgattggatcaaacaactggagcaactacatttctctgctgtccacgtctgccattactctagcaatccgggggctgttcagcgtcggatctggaaaaggttcgccatttgcagggtcatcgcgggcaagggatctttgtctatggataacattgtacatacggtatctcaagacgagtggtttttgttgacgccaggaatgcatgtggagtttcagacggatatggaagcacctgtccgatatcagatcattttattttcctgtgttacacttacccggcgtaagaatgcttggcataccgaggcatttgatctccctgtgacgggcaagcttaatgttccttccaatacacgtgatattcaggagatgatggataccctggtgagtggaaaacactcgtttacgagtctggaaaagacgcgcaggaaacatcttttgcatcagttgttgattcagttaatgatgcacgtgaatgaagcaacaccccctgtagcggggatggatttggcacttgattatatgacgcatcagtatatggaagacattcgaattgatcagatggcccgcgtggcagggcttagtgtgaatcattttataagaacattcaaacggcaattaaacatgactccgattgaatatatattgaaactacgtatggcaaaggccaagcagctgttattttcttcagataaaatcaaggatattgcagagcaagtgggttataaggacgagcactatttcagcagagtcttcaagaaaaatgaaggaatcgccccaacgttgtatatgaaaaataaagtgaatcgcattgccaccttgtattacgggttggacgattatgtgataacgcttggtttgaggccagtatccgctttatcttatggtcagagggtggctcgtcatgttgccatacctgcgcttcaagcacacagtcatcagggacttattctggatagcttcaatcagaactatgatgatttgaggcgagtccaaccggacctgatcattacaagtgatcgtttggagccaaatgactccctgaatcgtatcgcgcctaccaccatgctggagcataccaaccattttggcgagaggcttctgtatatggcggacattatgggtggcaccgaacaggctgtacagtggatagaacaacatgctgaactgagccgggttcttcgaggacgcattcaatcgaggtgggggaaacagagtgccatgttcatccgggtgacttctcatttctaccgaatgtatggattgaacaaccagacaggggcgctattgtatgatgatctgggattttatttgcctcgtgattttccggaacaacagtgggctgtagagagcaaagtttgcgatttgcagttatacgacgcggatcatgtgtttgtaatggtcgatcccacagaagacgcacgtgctcaactgaggcaattacagcaatccagtgcatggttggcattaaaggctgttcaagaaggccatgtatataatgcaggagatatttttttcaaaacgctgggtcccaccggacgcatgtgggccatgcgatatgtggcagagcaacttggggttaccttacggtgatattgtgcaagagaagagagtggaataatccatggtaagcctgtatgcttttccctactatagtgataatgattattattattaaatagtagaggggatttactacaaatggtaagacagagagcaacaacgatgatactgttggccctgcttgtgctcgttctgacggcatgtagcaaggcatcagaagtaacagaagcaacgcctccgcaacaggatacacctgtggaagagagtggtacgcaaacgattgagcatcttaaaggaacaacggttgtaccgcaaaaaatagagcgtatggtagtattatctgctgcttacatcgatcacatgttgacgattggtgagaaaccagcaggcgttaatgtagaagttcgttacggaggagattatttgccttactttgcagatcagcttgccggcattccaacggtagggtctgcagacagtcctaacctggaggctatccttcagattgatccggatgtcatcgttattgagagtcgaactgcggagagtacgtatgatcagttggagaaaatcgctccgacgattgtacttggtactgaatggctggattttgttgatgatacaacatattggacacaggatctgttgaccattgccgggatgtacaacaaagtggatctggcaaaagaaaagatagccgaggtagagcagcaggcgaagcaattaaaagcgaagatcgaacaactggatcaaaaaaagttggcttatctgcgtgtaagagagaagaccttgcaaatatacgcggcaaaaggacatccaaccaacacacttttgtatcatgatcttggatttgtgccaacgactgtgacacctgccgaacaacgtgaggacctgtccatggagaaaattgcagatgtggatgctaatttcgtagttctggagattgacccgaatgccgatgagtatgtaaacaacatcaatgcaagctcactctggaagggagtgccggctgtcggtgcagatcaggtctatacgacagactcgttctggttgtttaagggctggggagcgattgggcgaagcgagattatcaacgaagttgaagagatgattcaatagatgagacattatccaagacatgattattcagagatgtcggaagtgttacagcaattttttgtgacgacgatccaagtggactgcgatgattccaagtatcctttccgtgtgaaggatctgctgaatgaagagaaacgaaacttgatattgcgtgaacaggctatgcagcaagggcttcaattgggcggaagaggaagtgcggccgtcggtacactttttgccaaacgttactccgtatttgtgatgtccgtaatttcagcattcagtctatacgatactatacttagcgttgcagacgatgatgtgcggtttgaattgaatggtgcaggtggcatgcgatatgagactctgctggagagaacctctctggagggtgaagatcctgttcagcgcaggtcagagagtggcttgctcaagaaaagagtgctgttacatctggaacctgtcctgcgagcggtagccgtcgctacaagagcgagcgataaggtcatgtggtctctggttgcccataatgtgcaacaattgtatgcacgtatgatcaatgatcagagcatttggaagacagatgaacggcttgcaaagattcaagaagatcaaagcctctggctggatcggcaaaacgataatgcatgtacatttgccaatgagctgcagcgcttcgaacattccgggtggcagggacctccgttcctgctacgccgatattgttgtttggcttatctggttggagacggaagtcatacacatgggtattgtgacagttgtccgaagctggattcggaatcccgattgcgtaaacttcttcagcagtgaacagacactcttgtaccgcatggtacgaatctgtttcagacaaaccatgttctcttcggtttccagtggatagaatctatgatcgacaagttacacaacctgcagcggcttgagccagcgtctgcgggtttgttggctttgtacaaggtcacgatacctttgcatcgagggatagtattcgttatacttcaagctattgatcaattaatcactaactattggagggcggattatcatgacaaaggataaagcagcgtcggttaaccggcgaaatgatattatctctgcagcaattgacgtcttcgcggaaattggctattatcgtgcgactacagcccaggtggctgaacgggcacagatctcacagccgtatatatttcgttttttcaaaacaaaagaagctttattattaactgcaattgaggtctcatggacacgggtgattgattcgtttcgaattgtggtggagatggcgacaccagatcagttagagaatgatctcattgaagcctatgataagattctggaatcgcacaagagcgagatcttgcttcagatgcaggcgcaaacgatccgggaggaagtcattcgtcaggctatgcaaaaaggcattagtgatgtaagagccatggtactggaagctttcaccgttgcaggaattgctgaaccgctaaaaagaaccatgatttttctggcaatcgggatgttgtgtaatgtatctaatgcactggatatgccagagttgaaggaacgatagagagggaggtaaagtccctttttatattttagttattgatcaatcactaaatagatgaaagaggtcgatccacgatgaaaagagctattgtgattggagccacaggtggaacaggtgtagcaattacggaggaattgattagacgaggcatttctacgattgcatttgggcgctcccctcaaaaactggagcaacttgcggtaaagttgggatctccagatcacctgcaaatcgcagtgggagatgcatttcggtcggatgatattattgctttttcccagggtgccgatgtcatatttcattgtgcgaacgtcccgtataacgagatggagagcaggctaattccactgggcgaatccgtaatggcggcggcagaacacttgggtctgaacatggtggtaatagatggaatctactcctatggcagaagacaaatgaacgaggtaacagaagaacatccgaaacagccacatacccgaaaaggcaagacacgacttgcctatgaacagatgttattcagcacgagatggagtagagctcaggtgatgattgttcgcttgccggactattatggcccaacggccaatcaggcttcctatctgggttcaacccttgaagcgatagcaaaaggaaagatggctttttttatcgggaatatgaacgtgccgagagagtatatttatttgccggatgctgcggtaatggtggtggagctggcaagcagagagacgacgtatggacagaactggaacattcctggatcggggatcatctcgggtcatgacatcgtgcgattggcacagcaggctgcgggaagaagcaaacctgtgctggcgataggaaaagtaggattgtcggtaattggactgggtgtacccgttatgaaagaaattgtagaaatgttatatctgaccgaggaacccctgatcttgagtagacagaagtatgaggaacggattggcccgattgtggcaacatcttttgaggaaggaattaagttgacgattaaggagttggagttgcagagggagtagaggggaatatattttttggagaaaagtaattgattgatcactaactgtgaaggtttcataggtacattgaatagggggcgcacaaagctagtccagggcatagagtgtactattgtaaaatgcggggatttgacgtggtgtacaaggaggggggattctcttgtgagcggtatatccaaaaggaaacgcaaaatttcctcaatcagtacaggtaaacggaaagcaaaaaaatcaaaaaagcactctatcccaaagaagaagagtaagtcttgtaagaaaagcagacgtaaatgcaaaaaaaagaaaagtcacaggattcctttccttcgcggcccacggggttatcagggaatgagaggatacaccggagcaactggatctaccgggttaaccggagaccctgggtatcccggcatatggggagcaaccattttaacaggacggaccggagtaaccggaaccacgggaagtaccggaataactggagtcacaggtgcaacaggagctaccggactgatgggcaccacaggtgcaactggcactggatcaactggagtcacaggaacaaccggcgcaactggaattaccggatttggtgtgacaggcgtgaccggtgctacaggaaataccggtataaccggctttacaggtccaactggaattggtgtgatgggactaacaggatctactggtgaaacaggattcacgggagttacaggttcgattggcccaaccggagcgacgggtctaataggtattacgggtgcgactggattaacgggaagtactggcgaaattggaatcacaggcccgtccggagcaacaggaacaactggtattactggaaccacaggtatcacaggagtcagtggcgtaactggaacgacaggtactacgggcgcgaccggcccaaccggtgagacaggtatcacaggagtcacaggtgctacaggatttactggggcaataggagcaatgggaagtacggggccaactggaaatactggcataaccggcgcaactggtgccactggggaaacgggtctaacgggaattactggtacgacaggacccactggggggatcgggtctacgggagttagaggtgtaaccggaactacaggaagtactggtgcgaccggagcgactggcgtcactggagagacgggtctaacaggtattacgggtgagactggagttacaggaagcactggtacttctggaacaacaggcactacgggggcaactggattaacgggtgtgacgggagcaacgggcgaaacaggcacgacaggcatcactggcgttactggaaatactggtgcttcagggattactggatttacgggcagtacaggtgcgaccggcacgactggtttgacaggattcaccggagcgacaggaagtactggtgaggcggggctaacaggagttacaggtacgactggtctaacgggacccaccggggtcactggcgaaacaggatcaacaggtacgactggattacctggcgttacgggtaccacgggtgtaaccggttctactggaattacaggcctcacggggattactggagcaactggtgctactggcactaccggtgtcacaggtacgactggtgtgacaggactcactggggccactggtataagtggtgtcactggtgaaacaggaccaataggtacaaccggattaactggtgttacaggtataactggcgttactggaattgcgggcacaacaggaacgactggaataacaggagccacaggtattactggatttacaggcattacaggtgcgatcggagcagctggtgccactggcacaaccggagtcacaggtacgactggtgtgtcaggaccgaccggggatacaggagtaacgggaactaccggtaccacaggaataactggcgttaccggagcaactggtgccactggagagacgggtttaactgggaacaccggcacgacaggtgtgacaggaccgaccggggctactggagaaacgggtaccaccggagttacaggtgctacaggatctactggggcgataggggcaacgggaagtacaggtacaaccggcgttactggcataacaggtacgaccggtactacgggagttacaggcataaccggcataaccggcaatactggtgtaacaggagccacaggaattactggagaaacggggatttcaggtgcaaccggagttagtggcacaacaggaattactggtgtaactggcgcgacaggactcaccggggttactggttcaactggtaataccggagctactggcataaccggggtcaccggcgaaacagggccaaccggcacaactggcttaactggcgttacgggtacaattggtgtgaccggagcaacaggcgtcactggagagaccggagctacaggtctgacgggaaatacaggaccaacgggtgccaccggatttacgggtccaacaggtgaaacaggaatcactggagttacaggccctactggagcaaccggctcaatcggaactactggagatacaggttcaacaggggtcacaggtacgactggtgtgacgggaccgaccggtgcaactggagaaacgggaattacaggtgcggctggactaactggcattaccggaaccacgggtgtcacaggaggtaccggagctacaggaattatgggagcgaccggaaccactggcgttactggggagactggtctaacagggaacacaggtgtaacgggacttactggtgtgaccggaactactggcactagtggcataacgggaacaactggtattacgggagtaaccggagcaacaggtgtcactggagagacgggtctaacaggaggtacaggtgcaactggtattaccggaaccacgggtacagctggtgtaacgggcccaacaggcgtcactggagagacgggtctaactgggagcacaggtacgactggagttactggtataaccggtccgacaggcactacaggactaacagggaatactggtgaaacaggatcaacaggtacgattggggcaacgggtatcacgggagctactggtgtaacgggcacaactggcatcacaggggaaacaggtctaataggattcactggtccaactggtgttacgggattaactggagccacgggcattacaggagagacgggtgtatcaggcgttaccggcacgacaggaccaaccggagccactggtgcgactggagttacaggagcaacggggagtacgggttccacaggaataactggcgtaaccgggccgactggtgctactggaattactggccaaactggtgagacgggtctaaccggaattacaggtgcgactggtgctactggaattactggggtaactggatttacgggagttactggtgtaaccggcgcgactggcgtaactggcattacgggtgtgactggagcaactggaattacaggtgccaccggcacaactggccaaactggagagacgggtgtaacaggggtcacaggtacgactggtgtgacgggacccaccggggctactggagcaacgggaactacgggagttactggcgtaaccggcgcgactggaactacgggtacaacaggaacgactggagccactgggattacaggtgtgactggagcaacaggaaccacgggtattacaggagagacgggtgtagcaggcgttacaggcacgacaggtgtaacgggaccgaccggagcaactggggctacagggctcacaggtgtatcaggagccacaggcacaacaggagttacgggtatcacaggtgtgaccggtactacaggaactacaggtgcaacgggcaccaccggaagtaccggcacaacaggagtaactggacttaatggggttacaggtaatacaggatttactggaacgacgggagcaactggtgccacaggagagacgggtctaacaggggtcacaggtacgactggtgtgacggggcccaccggggctactggagccactggcataactggcataactggtacaactggcgttacgggtacaacaggaacgactggggcgaccggatctacgggagttactggcgttaccggcacgacaggtacaaccggagccacaggtacgactggtgctacaggggcaaccggtccaacgggtattactggtgaaacaggatccaccggcacgaccggcgtaactggcattacgggtgtgactggagctactggaattacaggtaccaccggcacaactggccaaactggagagacgggtgtaacaggggtcacaggtacgactggtgtgatgggacccaccggggctactggagcaacgggaactacgggagttactggtgtaaccggcgcgactggagccactggcgtaactggtgttacgggtgcaacaggcgttaccggcacgacaggtacaacaggaccaaccggagccattggtgcgactggcataaccggagttacaggtacgactggtgctacaggggcaaccggtccaacgggtattactggtgaaacaggatccaccggcactaccggcgtaactggcattacgggtgtgactggagctactggaattacaggtaccaccggcacaactggccaaactggagagacgggtgtaacaggggtcacaggtacgactggtgtgacggggcccaccggtgctactggagcaaccggagccactggtgcgactggcataaccggagtcacaggtacgattggtgctacaggagcaaccggtccaacgggtattactggtgaaacaggatccaccggcacgaccggcgtaactggcattacgggtgtgactggagctactggaattacaggtaccaccggcacaactggccaaactggagagacgggtgtaacaggggtcacaggtacgactggtgtgatgggacccaccggggctactggagcaacgggaactacgggagttactggtgtaaccggcgcgactggagccactggcgtaactggtgttacgggtgctacaggagcaaccggtccaacgggtattactggtggaacaggaacaaccggcactaccggcgtaactggcattacgggtgtgactggagctactggaattacaggtgccaccggcacaactggccaaactggagagacgggtctaacaggggtcaccggtacgactggtgtgatgggatccaccggggctactggagcaacgggaactacgggagttactggcgttaccggcacgacaggtacaaccggagccactggtgcgactggcataaccggagtcacaggtacgactggtgctacaggggcaaccggtccaacgggagttactggcgtaaccggcgcgactggagcaacaggaaccacgggtattacaggagagacgggtgttacaggcgttacaggcacgacaggtgtaacgggaccgaccggagcaactggggctacagggctcacaggtgtatcaggagccacaggcacaacaggagttacgggtgctacaggaactacaggtacaacgggtgtaacaggagccaccggcattacaggagagacgggtgcaacaggtgttaccggcacgacaggtacaaccggagctactggtgcgactggcataaccggagtcacaggtacgactggtgtgacgggaccgaccggggctactggagcaacgggaactacgggagttactggtgtaaccggcgcgactggtgccactggcataactggcgtaactggtgttacgggtacaacaggtacgactggagcaacaggaaccacgggagttactggtgtaaccggcgtgactggtgccactggccaaactggagagacgggtgtaacaggggtcacaggtacgactggtgtgacgggaccgaccggggctactggagcaacgggaactaccggagttactggcgtaaccggcgcgactggaactacgggtacaacaggtacgactggagccactgggattacaggtgtgactggaacaacaggaaccacgggtattactggcgcgaccggagcaactggagaaacaggaataacgggagctacaggactaactggtgtaactgggacaacaggaactacaggtgcaacgggcaccaccggaagtaccggcacaacaggagttacaggaataaccggaacagcaggcattacgggggctactggttctacaggtgcaactggggttgccggagctactggaagtacaggaactactggggttacaggcatcacaggcccaaccggcccgactggaccaactggtgctaatggacttacaggagctaccggcataactggtgtaacgagtgcaaccggagctacgggagctactggagcaacaggcataacaggaactacaggtgcgattggggcaacggggctgacaggagccacgggcccaaccggccccaattttgcaacacaagggttctcggcattcctggctacactttcgacagcaaccagcactcagttaaccaactggacgactacggctccttattacggtaatgcaaatttcaatgcaacaacaggaaattataccgtcccggtaaccggaagatactctattgtggccacgatcaattatgcaacgactgcagcgattgccctatctctgggtgctggggttaacccagcctttcttgtacagagaacatcacctacggtaacgacacttgtcagtggtttgttgcccgtcctaaatgtcgcgattacgctactcacactgcgggcagtgctgggaagtggttcagtgactttggcagtagaagtcgcattgaacgcgggagatgtgattggactgttctatgctgcaaacgggttgacgattacattgaaccttggcagtggtgctacaaatggcattgtgtggtctgtgcatgagatcacctaaacacttctcaacggattgcgcctatggacaaattcgtaaagttgtaataagttagtttgaagatattcgaaatatcttttggcaagtggaataacaagtgaggtggatttcatgattcctattttgggacgcattaacgaattaagtcgaaaacaacgcagcagcgtcggtttgacaaaagcagaaaaaagcgagcagcaggagcttagaaaacaatatttacaggctattcgaggtcaggtgctgacaaccatgctggcagtatccgttgtggacccactgggtcatgatgtgacccctgagaaattaaccaatgaaaaattgcagcgccgtgaacaagccggccaatagcattcctttaataagacagaccaaggttacatcttggtctgtctttttttattttctgtagagcatccatcaggaaaaaagcactttaaaagaggaaggtaccatccaattagtgtttcgtgcgaattaacaagcatgttagatatttttagttttgatgacaataaatctgccgccaacttcaattcatctccgataactcatataataacgctaatatattttaggaatacaagatgaaatcacaattctcctcaatataactaacaacaaacttacatcaaataatcaaagaaagactagttcatatatgtatctcgaaagggttgatgaatcatgagcctggaagctttgaatgaacgtgtgaagaatgatctggcgtatttgtcatttggtggcgcgaattgggtacgtccaagagaacatgcggatggtcatgtctatgatgtcgtcattgtgggtggaggccagagtggattaggggcggcatttggacttcttcgtgaacggatctccaatattgttgttattgacgagaatacatcggggcttgagggaccttgggagacttatgcgcgtatggttactttacgtacacccaagcatcttacttccatcgatctgggtatcccctcgttaacctttcgctcatggtgggaagcacaggttgggcccgaaggttgggaagaggtagataagatcccgcgcggagactggatgaattatttacgctggtatcggaaagtgctgaatctgcctgtgcttaatgagatgaaattgacactggttgagccaatagaggacggtatacatcgacttcatgtgaacagggcaggaactcagatggatgtcatacttgctcgcaaagtagtgtttgctacgggaatacaaggtggtggagagtggcatgtgccatccatgattgcggatagattacctcgggatcggtatgcacatacgtcggaagcaattgattttgatcggttaaaaggtaaaagggttgctgtacttggcggcggcgcttctgcattcgataatgcgagctatgctcttgccacgggcgtggcggaagctcatgtatttgtgcggcgggaacagctgcctagtgttaatcctattcgtcagatggaacaatccggtatgattgagcgataccacgctcttccggttgctgataaatatgaagtgatctctcatttcttcaaattcaatcaacccccaaccaacgatacgtttaatcgtgcggcagcctggcctggattcgaactacatttgaattcgccttggctgagtgtagaagcaacagaccaaggcgcgattgtgcataccacacagggagcatatgagtttgattttctgattattagcacaggtcttctcagtgatccggcactccgtcctgaactgaagcttgtggagccatacatcgcacgttgggaggattgttaccaggctccgccagagcttcgcaatgcgttgctggacgcacatccatacctgagttccgggtttgcaatgacaagcaggagtgaacagggtgagaaaccgttgcacggactgtttgtattcaactactctgcacttgccagctgtggtctgtcggcatcggcaatatcgggaacgaagagtgcagtgccgaaactggtctctgccatagcggatcagttgttcctcgatgatcgagaggttattttgcaacaattttatgcgtatgaagaacaggaatttacggctacttgggtgaaaagtgctgctctcgctgagtaaacgcactccataatattgtgaacgtgtggcatctgatgctgcacgtttttttgctttttatatgatgaaggttacacttgcctttaatttgttgtaaaatgtcggttggaacatgttaaaggcagggataatagatgaatgaaatgaactatgaacaatttagagcccatttgaagaaagcgtcgcgtaaacgaaatgtacctttgattaagatcgtagcatttcaagagaaatacatgaagattgaagaagttcaattttacgatgtggaacaaaatcatatgagtgttcgggcttgcaatacgttgtggatgcatctggagaataaatctttccgtaatatggtgtcccaacatttgcagttttatagagatatggagaacctgggtcggcattcctttgagaatctgatcaaagaactatatgatacgtctgttcctgtgctgctcgattacaatcccgctcattattacaccttggggcagctcgctgagattctggtcatggacgaggagaggttaattgaacaattggagatgggccgcttcaagggtgcttttattaatgaagatggcaaatggcttaaacccaaaccggatgctatggttgtagagtcataaacgtcatgcagttcccatgaacagcaaaatcctgcaacgccgcgcatccagcgctggaggctgcaggatttttaatgaagatttgaagggcacggaattccaactttaagaacatgaagtaagaaagggacaattggacaagaaaataagtcgaaagatgcgggtttttgaatgtttttaaattattttgaatgaaagtggttgttttttgagtgaattatgatactatagaagcagttggaggaatgaagatgctgactgaagaacgatatgctgcaattatagagcgcttacatttacagggaattgtgaaattgcaagagcttgttgatgtgttgggtgcttctgaatcaacgattaggcgtgacttgatcgatctggagagtcgtcagatgctcaaacgcatccacggcggtgccgcactggtgaatgaaaaaacgctggaaccgggcatggaagaaaaaacgttcaaaaacatccaacaaaaaacgacgattgcccgtttggctgcacaggagatagaaaatggtgaatgcatttatctggatgcaggaacgacaacgttagccatgattccttttattgaagctaaagacgtaacggttgttaccaatggactttcacatgttgaggctttggtaagcaagcgtattcgcagttatttgctcggaggtatgatgaaaattcatacaaaagcagtcattggcagtatcgcattacagaacatggataatttccgttttgataaatgttttcttggaagcaacggagttgatcccgaaatggggtatacaacaccggatccggaggaagccttgattaaaaggcgtgcacatcaattgtcgggaaaatcttatgtgctggctgattccagcaaaataggggaaattacttttgccaaattgtttgatttggaggaggccgatttgattaccgagcagatgccagaacattggcggcatggaatcgcccagaaaactaaaataattgagggataacgatgatatatacgataacacttaacccgtccattgattacatcgtggaagtggatgagctgaagcttggcggattgaatcgaatgaatcgggatttgaagctccctggcggcaaaggcattaatgtctctcgcatactgaatcaacttggagcagataacacggctattggtttccttggtggatttactggacgtttcattaatgacaagttgcaagaagataacattcggacagactttgttacgattgcagacgatactcgcattaacatcaagctgaagcatggagaagagacagagattaatggtcttggacctgcaataagtgccgaagaggcggagcagttgcttcacaaattgtcttcgttggaaaaaggagatattgtcattctctccggaagtgtaccgccttcacttggaacggatttttatgatcgtctcattaaagtatgcaagcaaacgggtgccgaatttgtgattgatacaactggccctgcgttaatggaagctcttgtacatgaaccattgctggtgaagccaaatcatcatgaactggctgaactgttcggtgtaacgattaatactcgcgaggaactggtgttatacgggcgtaagttgctggaagccggtgccaaacatgtgttgatctccatggcaggcgagggtgcattattcattaccaaagccgaagttcatcatgcgaatgtgccaaaaggcactgtgaaaaactcggttggtgccggtgactccatgattggcggattcgtaggtacctatgtacagagcggagatttgctggaagctttccgcaccggggttgcatctggaagcgcgactgcgttctcggatgatctggcaacacgcgaactgattgatgaattacgcaatcatgtaaccattacagcgatctagtctaacggcaatataaaaggtttttactgtaattgtaatgtagtgaggcctgcctaggcaggccgactgaacttaagggagtgtaccgagatgagaataacagacttgatgatccaagaaacgatgatcatggacctgcaagccacaaccaaagatgaggctattgatgaactaattgcaagcctgaaccgaagcggacgaatcaatgatccggtcctgttcaaggaaatgatctataaaagagaagctgaatccagcacaggtatcggtggcggaattgcaatgccacatgccaaaacaacagcggtgaacgaaccaacagttgtatttgccaagagtagaaaaggacttgattttgaagcgttggatgatcagccagctcatgtgttcttcatgattgcggctccagaaggcgcaggtaatacccatctgcgtacgcttgcagctctttccaggttgttgattgatagcgatttcatctcacaattgatgagtacagatacaccagccgaagttagtacattgtttgatgccaaacaggctgaagcagctgagaaggaagcagccaaagaaaaagcaaaagctgaaaaagcagcaaatgccgcatccacttctactactggtcagcaacagaatacttctggtgtgattgtaggtaatgccaattcggaagattttgttgttgcggttacagcctgtccaaccggtatagctcatacgtttatggctgaagatgcacttaaaaagaaagctcaggaaatgggcattaatattcgcgtagagacaaacggctctgaaggagcgcagaatgttctcactgctgatgagatcgctcgtgctaaaggggttatcgttgccgcagacaaaaatgtggagatggcacgtttcgatggcaaaccggtattacaaagaccggtgagtgatggaatccgtaaatccgaagagctgattcgcaaggccgttaacggtgatgcaccgatctatcgcagccaaggcggaaatgccaaggaagagggcgcaagcactggcaagattagtgtaggtagcaaaatctataaagatctgatgaacggtatctcgcatatgctgccatttgttgtaggtggcggtatcctcctcgctatttcgttccttattgaacagcttgcgggtgaggataatcccctcttccagctgcttcaaacgatcggtggcggaacaggtgcgttccacttcctgattccggtacttgccggatttatcgcgatgagtattggtgatcgcccggccctgatgcctggtatggtcggtggattgatggcggttaactcaaacgccggtttccttggtggtttggctgccggtttcctggcgggttatgtagttattggtctccgtaagttgttcaaaggattgccaaaagcgattgatggcttgaaaccaatcttgctgtatccggtatttggtttgctgatcgtaggtgccatcagtttctatgtctttgatccaatctttggttccctgaacacttggcttgtagatgcacttggtaacttgggtacaggtaatgcggtattgttgggcttgctgcttggcggtatgatgtccatcgatatgggtggaccgttcaacaaagcggcttacacattcgccattggggtattcacatccagtggtaacacagacggtgcatggatggcagcggttatggcaggcggtatggtgcctcctctggcgattgcacttgcaacaacattcttcaaatccaaatttacagagcaagaacgcaaatcaggcttgactaactatgtacttggattctctttcattacagaaggtgcaattccatttgctgcggctgatccattacgtgtattgacttcttgtattctgggttccgctgttgctggcggattgacacaactgtggagcattaatgtaccagctccgcacggcgggatctttgttgcagcactggcgaaccacgcattattgttcctgctcgctgttgcgattggttctgtgatctccggtctgattctaggactgtggaagaagtcaccaacgcttgtgaagtaataaatataagaaacatctcctgggtgaaactcacttgggggatgttttttatttcagcttttttgttaagtagtggaaagttgcctccggatttgtgtaaaatgcttatttagcttttacattcatctatggtaaaataaatataattatattttgaaactatgtttcgtctaatgaaacttatgcaggaggaattggaatgtctgatgtaatcaaaagtcaggtgcagaagcagtttgcgaaaaatgcaggtaaatatgtgacgagttcggggcatgccagcggtgaggatctcgcgttgctcgtggcttcatctcaagccactccggatatgaacgtgctggatatcgccactggaggagggcatgtcgctaatgcattggctccacttgttcagcgggtgacagccctcgatctaacggaagaaatgcttcaggtagctgaagcatttatccagggcaatggacaccgtaatgtagattttgttgccggggatgcagagaagctgccattcgatgatgatatctatgaccttgtaacctgccgaatcgctgctcaccattttccggacgtttcttcgtttgttcatgagacattacgagttgtgaagcccggcggaaggttgttattcattgacaacgtggcacctgaacgggatgagaatgaccagttttacaatgaagtggagaagtgtcgggatgcaagccatgttcgggcatggcgcaagacggaatggattcatatgctggagtatgccggcttccgaatggaaacgatggtttccttccagaagcgctttaagtttgaagagtggtgtaaccgtgcggcactgccggaacgggagagaagggaacttgaagcaagtatgttgagtgcaccgtccatcatcagaaaatttttcaattttgaagtgacaacgaacgggaagctcgacagcttccaaggagaaagtgtgtatatccaagcgactaaaccgactcatgtctgattaggtaaagaccatttagttagctgagcagttcctaaatgagtaaaaggttgtataccaataaaaataaaacaagcagagtaccttgaataggtaaagttgcttgtttattttttgaccgaaacgacggttcagacggtccctcttcttgacacgtgtcacttcctatttcaggactaatgatagagatacatactaaattaaacgacaggccattttactttacgcaaggcatcgagcaactcaggcggcgcattcagattgtcacggaccagatcccgcggggttaacgccatccactgattcagcgatacatcctcgaatcgatcacttcggaatatctccaaaaaccataacgtgtctgtgccggtattttgtatatagtgtcccattgcgacaggaacatatccgacatctccagcccgatagtcaaatgtgcgagcaatgccattgcctccaaagacagtcattctcccttgtcctgtcagatagtattgccattcatctgcattgggatgccagtgcagttcacgcatggcgccaggtcggatctcaacgagtgcggcagcaacggtagttgagatggggaagttggtggagtctacgatccgcacgcttccaccgggtgtaatgagtggttcctgggccagcaatcggtgtttgaatgtgagaggaacggtaccatatggcgactgaatttcttggctctcgatggaacccgggacggtatcttggaaaatgtagacctgttccttcggcattgactgaaaagcggattcgggcacgccgaaattgacagacaatacctctggtggggtatgggcaaaccaatcggatatggataacgtattcagatcggagaaggacccgtcatcaaacacaagcagaaattcacaaccatcctccagtccctgaatggaatggggtagacccttggggaaaaaccagagatcgccaggcccgacatccgcaataaaattacgtccgttctgatctaccgaagtgattcttgccgttccccagatcatataggcccactcggattgctgatgccagtgcaattcccttacacctcccggtgtcaggctcatgttcacacctgccagtgtagtggcaatagggagatcccgtacggtgatttcacgtgaccaacccccatggttcaattgcatatgggtatcggaaaaagacattctcagattgggcaataacccgttatcggttgccggaggtaccagcatatcggggttttgtatatctctcatgacgtctctgggtcccagatcaggtccaccagcgccatcactgcgaatgggttgcgggataataaatgatttttcgttaggttgctgtcctttagtcattgagtgatccctccagattcaataacatgtcacacgcgacattgtatcgttatgtttacacctatgaatcagggcctggataatatgagggacaaacgacaaaaaaagacgtgaccgcatgtgatcacgtctttattctagactacattgtacgaaaacgctgctcgtagatctcgtttacccgctttaaaacagcagggccttgctctgtgaaacgaagcgttgtcgctttatttttgaccaggaacgcaccggattcgtgtctggctggggataaggccgcattgtagagcaacgaagcgccatggcttggatgaggaaagaaccatttcatgataggtttgatatagaagggcaggccggatgttttgttgccccttagcgtgttatttccaccgggatctacgcttagtaattgtatgccatccgcactggcagacttggcaacctcgcgtgtccatagggataagccgagcttcgaggtggcataaggaccaaacagctttttgaattcggctggacgttccaggatgttcatatcaaattgtctgaccagattgaacgaggtggtggaagtattaataactgttttcatctgtcctttgagtaatagctcaactaattccatgtagatgatgtaagggactaccgtctgaagttcaaagtgcagttcatgcccctgatcagagaaacgaagttcggcagcgctgccccccgcattgttaaacaaaacatcgatcgaatcggtatcggatttaatctgatctagtgcagttctcagactgtcatagttggtcaggttagcctgaacccaacggagctggcctgaacgtaaggcgttctgaatatcggtatcctcggatgggaaagcagaacggttgagaccgattacctgccatccttcagccagtaatttgcgtgtcagttcaagaccaattcctgacgttgatcctgtgatgagagctgtgcgaagctgattttgtatattcatatatacctccagatagaatgggattacagaacgaatctgtatgctgcgctcattctataacttggagtcgactccaagtcaaggggtgttgggatggaatggatcatgcttgacttggagtcagctccaagttgtaatatggagagaaatgaatgtggaggaggcccatatgatgagtgagaatgaagtgttctccattaaagaaacgtcagaacaggccggattatcagaagatacaattcgttattatgagaagattgggctgcttccccgagcggaacgcaaggccaatcgccatcgggtatatcgctcggaggatatccatacgatgaagttgatcacttgcctgaaaaaaacaggaatgtctctggaggaaatgaagccttatttacaaatgtccatggattccgatctcgccgatttcccggatgaacgggagatgctggtgaatcaccggaagaaagttgaagcacagattgcttcgctacagcaggtggttgattttatcgacgagaagttggagaaacgaagtatgtatcctgatgaatgtcctattaccggggagaaccagatgtctgtttttgaaaaacagagcctattctcttgatggcactgctacctatttgaatccgaaaacccacgtcatgatgacgcgggtctttttgctgtttctagtatttaatatcgagtgtatgacgaagtcgtttgatatcgctttttacgaagagggttgtctgaaaaaaagcatactgaagaagggatatgatatattaatgagcgatgttacacttttttgatagcaactacatctgtaggttgagaagaattctagataagagaggaacgacagcatggattactggggaatacttggtatagagcctactaaagatttaaatgcgattagacgggcttattcattacggttaaaacataatcatccagaagagaatcccgaagggttcaaggagcttagagcagcttacgagcaagctggaaaaatagcatcaacaggatcgatccaaccgataaatgttgattttgatgatgatcgtgcacaccacttcacggaagatacgcaggttttagctcaaggtatacatatcgaagacttacatatagctcctcctaagcgggaagatccgctacgtgaagttgtaaatcattttctggagagaacgatcagactgtatgaagattttgactcacgcattcgttacgatctatgggtgaaccttgtggaggatgagcaattctggagcattcaggttcgggaaagactacacatcgaattgttagatgttttggcagaacgaagctggctgcctagtatggtatggaaattattagatgatacgtttggctggatggacaatgaacaggagttaagcgagcgattttcttactcgtttctaagtcacattcgttaccaaagtcaaagtctatatgatttgcagcttgaatttttacaccaagcggcagcagatggtttggagatcgacgattatttatattttcgtgaattcgcaagacgtgcactcattcatcaagacttggacacagcgcacgagatgttgggcaaagcttacgcaatgtatgaacaagaccctgtgttactgcgcttgattgcggtatattcgatgaatgttgaggattgggagactgcactccacatgtattccaggcttgcaactatactacaaaatgagcctcaaattttccgtcacttggcagacgtgttactgaagtgtggacatgctgaagaagcgttatccatcaacatgcagttgtcggatgcaactgaagcagtgatctatagtcctgctttatcatctgcagcgcagtgtctgatccagttgggtagaaaaaatgaggtcatagccttatataaggcggcgttagaacgattcccagcggacttggaactgcgaactcgtctatggcatgtacgcaatgaatatgagcaagaacgcatcacgattttggaagaggagtttcaaaataacatccaacctggaacggaacagatcgaggaactgatcgagctttaccgtataaggaaaagatcagacaaggtaatatccatgattgaaggatttggatcagaagtactgttaagcaggaaagcgtggttttcggctggtcaaaccgtatatgatgtagatcgaaaacttgctttacagtaccttaatcagtctgtcgcaatgtccacagaagaagcctttgttcatcaagaggctttgtacttacgcataaaagtcaattatgatcttgatcatgatgaggcagtaatatcagacggtcttattgtgaaagaatacatgtcagaagagccgggagtctatttttatctcggtgaagcctatcgagcgctggaacaatatgaacaggctaccttgaattatttacaggcaaaaacattaaatggtggcgcaggctatgaatttggattagctttcagttactatcatttagaacagtatgataaggctataacttgctttgagacttatatgaatgaaggtaatgaaagtgctgatctctatcactaccttggcatatcgtatatgaatgtagatcgattcgaggatgctgttcagtgtttccaagcttgtttacgtatcgagagttatccgagcacgctgtatcatctatttacaacctacagaagacaagccaagattgatcttacgttgtctaccattgaacaatatttggagactggggacactgcgtatcaagatgaagctcttggtgtagcagcggatctccattttgctagaaagaactggagcactgcccatgatttcttcttagtgctccataaaaagataccggaggtttctttattaacaaaaatgattgctgtctgcctgcttgcggatcgtaagtttgaggaggcaacaaaatggattttgaagattcaggatcacgaacctaataatccgtgggcgcttttacaaatgattcgcatctttgccgaactcaagcagtggtatgagttggacagcgctatggtgcattattataaaacagtagaacctgccaagattgatggttacagctattattatgggggcttacatctatatcaggcacgtaaatacgatgtcgcttgcaaaatgttgacccgggcttacgagtttggtttgcggggggatacatgcagtttactgagtttatcctatatgcatcttggtcaaggagagccggcacttgtgtatgccagagaggctgtggcagaccgacctgatcatccggattaccttgcacgtctgcaggatatggaagagcgtctgagtcgacggggagcctggttcaataagctgaaattcaatatattccagatggggttgaaacaaaccgtaccacttcaattccctgatctattgaatgatgaagagctcagaccgtattataacgtggaggtattcaacgatgcattctttgcttgatacaagacagcagtggacactggcagcgggagccattttacttgaggcaaatgctttggaatttgccacagggtatgatattgaacgattggatgggaaaagggaaggcatcattgagatgtttggtcgggcatggagtattcgggacgagcagtcatttcatcagcaaatggaaagttttcgagaaggaagcgggcaccatgataaatttgatcaacacagggcgttattgtccgtaatgactcatcaggagcaggaaaactacatccttggtttggaggaagagacgctcagaactcaattgagggtcatccagctctatgacagtcgcctgaatgcggcaagcatcagcgcctgggactggggaagagccatatcaattacacggatggcgatgcaggtcggttatgtagatgagaagacggcatggacgtttatgtatgaaatggcgcagcgaattcaaaaggcgtattcaagttggacggaattcgggcttgcctaccttataggacgtcagtattggcatgaagaattggagacggagtcagccctggagcacttttcgcttgtagagcatttgttcgagcgggcagacagtccatggaatgtacttctgtgggaagaagcaaccgttggtctgcctgttgaaccagaaagagaggaatagtgcagtgacattacaacaactaaaatatgtgatcgaagttgccacgcgcggttccatgaatgaagcagccaaaaggttgtttatctcgcaacccagcctttcgaatgccattcgggatctggagcaggagttgcgaattactatttttgaacgtaccaataagggaatatctctgtctaaagaaggcgttgagtttctgagttatgcacgtcaggtggtagaacaagctgaattgctggagaatcgttatctgaacgccaagccatccccgcagcacttctctgtatcgacgcagcattatgcgtttgcagtgaatgcctttgttcgtctggtacagcagtatggtcaggatgaatacgagttggcgcttcgggagacaaagacctacgagattattcaggacgtgaaaagcctgcgcagtgaaattggcatcctgtatttgaatgagttcaatgccaaggtgattaacaaattgttaaaagatgcgggattggttttcacgagtttgttcacagccaagccccatatctttatcagtgtgaagaacccgctggcgaagcaagagtcggttgcaatcgagcaactgcaggattatccgtacttgtcatttgatcagggagagtacaattcctttcacttttccgaagagatcctaagtacgttatctcaccccaaaagcattcaggtcaatgaccgcgcaacattgtttaacctgttgattggtctgaatggttatacgatctctaccggtgtacttagcgctgatctgaacggagacgagatcattcctgtaccgctggaatgtgaggaatccattaatgtagggtggataagccacaagagcacttctctctctaatctgggtgtagcatatgtccaggctttgcatgaggccatagggtcttaagagtgttaaatggttcatcaaaaggccgtttccgaatgagtcggaacggttttttgttgtactatgatctttaaagtatagggtggtatgttgtcatcccgtgtaatagaatgaaggtatatgtcgaatgtgtgcaagagatcgaagggagaacggttagtgagagttctgtatcggaataaaagtgaacagcatgagctgacggtatatgataccaaaaagctttatggagagaagggccagtttcgtgtattagaattctccaatgcagctgtgcagggagccatggatctggatgagcctaaccggatggtgttggagtatccgagagcgatggtgcatctaatggaacggaatgatcctgagtttgataccgtatttgtggtgggacatggtattggcacattgccaacctacttgtctgatcgtcaggtaaaggtggctgagcttgacgcagaggtcgtggagttgagccggaccttttttggatatgagggaagtcctgtgctcattggggatggtcgtgaattattgggccaggaacctgctgcgtcatatgattatattattattgatgcctttacggcaacgggtacacccgagcagtttatatccagtgatttttttgccatggtcaaggacaagctggactcgaacggagctgtgatccttaatgtgttcgggcgtgcgggcaatgatcggcttgtcaatgcgatctatacgacacttcaggcacagtttgcctatacacgtgcattcgcattacctacagaaacagcggatgaagttcaaaatcgcattttaatgggtagtcatcacccgatcgaatttcagattcgtcagatggcagggtttgttgaacaagagccagaagaaggatatatcattgtcgattagggcgatcctgaacagtgattcttccagggaaagtaaaatgtcattaaatcgtcaatcttacgatgtaattgttaagatttctcagtctctttatttgatcttaacaactttcgtataagatagaaggaatatgctttttcatgaaaatccgggggaagtaaacgatgattgcacagatcaagagatctagaagattacgaagaaaaataaaaaacatcaagaagatcagcctcacggctttactcggcgggttggtcactatttcagttataatgacattgaccctcatggtcatctcatcttatacatctcagaaacagtcactcattgataacaccctgtccttaaactatgcaagcgctgtgcaaatgagtcaaacgctggattcgcttttttattccatgcaagagagcttgaaatatgcagccaattatttcccggatatggatcactccaatacaaaagagttgaattccacattggatttggttcgcaatagcagtaattttttcaattccgtttctttggtaaataaagctggggtagtcaggtcaacctcaccttactcagaggctagtgtaggtcaccatgttagttccaatgcagcaaaagaagcggttaaattgagaacttcgtatatctccgaagcgtaccagacacccagaaccaaacgcagaattgtatttgtcagtgaaccgatctttgattctgcaggggattaccaaggaacaatcggtggaaatatctttttgcaggaaaataatatattgagtctgtcttttggcagtcagctcaagacaagtaatgggtcctacttttttattgtggataagaagggcactttgttatttcacccaaacaccaaccgaattggtgaaaatgtcagtaaaaatgaagtggtgcaaaagctgctagtaaacaagcacggtaaagaacaatacaaaaacctggcaggtgtggattcgcttgcaggttattacaaagttccatcaacagattggggcgtcgtaatcgtgtctccaacccaaacggtgtacgatcagttgaatcatcatatccgtatgttgttactgtacacctcagtgcctttcctgatcctgacccttattgtggttcgggttgcacgcaagctggccagtccttttgctatgctggctgatttggtgaatcaggtcgataagggacaagtagaactgcctgtgatgaaacctcactggaatagagaggcagaccttctaacaagagcagttgttggcgcattagcgaactttaggaaacagacaaaccagcttgtctatgatgccagaacagatgttttaacaggcatgaacaatcgcagaaccttcgaagaagtcattcaggaatggattcaggatgaggcgccattctccattattgttctggatatcgaccgcttcaagtccattaatgatacattcgggcatcatgctggggatgaagtattaaaacacattgccaatatcattcaattgtctgttcgaccagaagatgtatgcgccaggtttggtggagaggaatttgtagtcttgttaagaaattccgagtctaacgtcgcttttgagattgctgaacgtatccgaataacggtcgaagaaagcatattgcctatagatcgttccgtcaccatctcggctggaattgctgaatatcccaagcactccacaacatccacagaactgtttcacctggcggataatgcattgtatcaagcgaaggaagagggacgtaaccgtacggttacgatccaatcggttattaaataagcaagcaaagaagctgttccctaaaactagggacagcttcttttgtgtactatacctcttgtgaggatctggccagaacctcatttgtatacgtttctccccaatctcgcatgctgaagataatcggccgtaacgtttcaccaaatggtgtgagggaatactccactttaggtgggatctgggggtatatttcacgatgaacaattccgctgctttccaactctcgaagttgcagggtgagcatacgctgggtgatgtcaggaaacaattttcggatctcgttaaatctcaaaggaccggagaataaatgatacaaaatggcacctttccatttgcctccgatcacactgagagtaacttccacggaacagccgtatggcgcgggacatagcttggttgcgtcctttttcattataagtacacctccactttacggtgattttctatagtatctatttgggtggttatattacataacgtacgtatagttcatgaaagagcatatcacttatgatgcggattataaaccctaattatagtcgaaggcagatgtgctgatgtctataatataaaaaagagccccggtttcaggctcttcgctggaagtataaaatatgatgatgagcgtatatacgctacttcagtgacgatagaatggagtcacatagatccattgttgcaatattatccctggcgctggaatgtgggacagtctgattctggcaacacgcgatgaagtgcgccatttcaccaacaaacccgcgtagataaaggtcacgataagctcctgacatgggagatccggaaggcgtatatacggtatcttgctcctcgagagatttccagggaaggctggtcgagcttcgggattgatgaacagtaagtgtgttgatctcttcagctgacgcaaatccgttgtcaaaggtgacgagtacactttcactctcccgtgaccaagcactcatgccggtaaaataagcgctgcctactacgttattctcaaatacaagggaaatgctttgattaatgtgttccccgtccttcacggttgtgcctgtaactcgtattgcttctccgaataagtaacgcatcagatcaaccatatgaatggcagcgagcttcatgaactgttcctcatccttgcaaaatggggtactgtctacagcgaatttcatctggaatgaacgtaccttacctagcgaaccactatcaattagctccttcagcttcatgtatatgggggcataacgtttcataaaaccgaccatgacaacgacgccagcctgctcggcagcttctgctacagtggtggcttccgctgcgttccatccgagcggcttatccacgtatacattcttgccagcccgaatgcattcgagaacaagagcggtctgatcaacaggctgggcgaccacaaccactccgtcacagatttcctgctgcaacataagctgagcattgtcatacgcttgtccgttgctgccaaatcgcagcagagctgcttcagagcgttccatactgcgtgtggcaatggcctggatctgcgctccggcttcaacaacagaagggtaaatattcgtggatgcatgaaacccggcaccgataaaacacagatgggttgttttcaaggtggatctctccttcatttttgcattcgtatggatggtatatttgttgtttaatgctacgatagggtgtttgaagttgtgaaaaaaggacatatgtcctattcttgaatgaataaaaaaagaagttgcatttttattttggagcatgtatactctgaattacggtaaaacaaggaattgtttcaccttaacgcttttcatcgatggatgaggagatacatattatgcggtcgtggcggaattggcagacgcgcacggttcaggtccgtgtgggctaacccccgtggaggttcgagtcctctcgaccgcatctaacaaaaaaggttcgtgagttgctctagggcaattcacgaaccttttttattttgtggatcattcgtgtgaagcctgcattttgctaccagcatgctaatgctaatgttgccgctggcgcagaatgactgccgtgatgatcccggcaatggctcctgcaataccaaatagcgttacactggcaaccacttcaaccgactggagacgaaacaaaaaagcgataccgctgccaaaagtggttccggcgagaaatccgagcgaaattcctaattctttcgttaatttcattgcttcacctacttggaaatgtgagatatggatttgcaaatattgggtacaggcagtaaagtgtgatcaggaaaatcatcacattttatttccttttttatcttgtggttttaacccgtttattatgcatgatatctcatatgggagggtaagagcgaatgaatatgaacgaacgaattgcagcatggaatgaggaagcacagcagtgtgcttgcggtcatcaacaccgagtggtggatatgctgatacatctggaagctggggccattcagaggttaccgggttatttgtctgagaaaagatatcgtcaggtgacggttgtttatgatcgacatacgtttcgggccgccggatctgatgtgctgagtagtattcgcaaagcgggaatgcatgtggatgagatcgctctaccggagaatcgcacgggggatatcattgcggatgaagcagctattgtgcaggttatgttgggtgtgagactcgaaagtcaggctgtaattgcggtgggttcaggtaccattcatgatctggtgagatttgtttgttccaaaatgaataagccctttctgtcgataccgacagcggcttccgtggacgggtttacctctgcgggtgcacccttaattgtaagcggaatcaaacagacatttcaggctgttccgcctgaagccatttttgctgatatgaatatcctggagcaagctccccaagtgatgacggctgccggattcggagatatgcttggcaaatatacttcccttgcagactggatcgtttctcgtgaactgggcggagaaccgttctgtccggttgcttatcggatgacagaagaagcgctgaatacctgcatagatcatgtacaagctattgcggaggggcgagcagagggagtagctgtattaatggacgccttaattgtttccggtatctccatgctaatcattgaccattcccgtccggcatccggaggtgagcatcatctgtcccatattttggagatggatctgatgcaagcgggagaaagaccggttctgcatggtgccaaagttggcgtagcatgtgcactgcttacagtgaaatataaagaacttgcacagacatcgggtgaaccggtgtttgggatatatgaccaattgccggaggcttctcagctcatcgcatggttggaacaagtaggtggccctgtgactactgagcaactcggtgtaaccccggagatggtggaacatgcattcaacacagcgcatacacttcgtcctcgatataccggtttgagatatatcaatgaagtattaaacacgaggttaggatgaccttttggagagaatggtcctgatgaaatgcattaacttcgcttttagcgggctgtgatggctctccttgggagcaaaagacgaaaaagggtaggttatctgacatttctgatggaatagccagaacagtgcttcaagcccgagagagaaggcatgcatttattttaaaaaaggctctggcctccctatggggagatcagagccttttggctgttcgcttatttagttgttgcgacgatctttcaagatgacatctgcgaacaaaatagttttcgggatacggaaaaattgctccgcttgttcctgaaatgcagcagaaggcagtgttccctgatgcagccatttgcggaaagtgccgggatgaaccccgatccagtggctgacatctgtcaccgacagatcatggaccatacacaagcctgtcaaaatacggttactaaccggagaacgggtcaccgtacgcttcatgaagcgagatgactcgggttgacatatgacagggctattacgcacaacttcttcattgaagagaatatgacgcgggtagccgagtaattggcaagtcttgtccaaattggtactgccgggtatccgtccttcatatacccacgcactgacactgcgtgaagagatggagaggtcttcagcaagctgggacaacttgatatcattggccatcagcacggcaagaagaacacgattgcggatttgacagcgtgtcggttttcggaatcgtttaacacggacgccttttcccaagtatttacggttgatcagagaccacgcctggatggaatgttgttctggttgattaggcatatttcctccgattttttttaaccaaatactacaataaacaacggggtactttcaagtgccgggattacctgttacaaatgcgtcaatgcgtcaattcacgataaagagggaactacgaactagaccatgcgcaattcacatcctagtatattcctagattacaatgtttcactaaaaatgtggggagaaattggacaggaataaaaataatatagttctaattgcttattactaggtctaaagaacttttatctgttttttgttgatatgatgcggtttatttccctgaattccccaaaatcatgtgattttcgttcccctgttgcgaagaggatgtgcacaaatctgaaatgataaatccgcatgttcagcatgacatgtgacctgtcaaatctcttacttttacatatattgtatgatactcaagtgtaaaggagaggtgaggaacgtgcatctatctgtgaatacctttgctgtcatctcgggagcatttgttacgtttgcttttggcggatgggatcaattgctgagcctgctcgcggtcgcgatggctgtggattatataacaggtttggcagcggcggtaagaacaggtaccggcttgaatagcaacattggattctgggggattgcccgcaaagggctcatgctgaccgttgttttgcttgctcatcgaattgatctgatcatgggaaccgattttatcaaaggcggagctatttatttctatctggtgaatgaactcatttcgattaccgagaattatgccaaaatcggtcttccattgcctgcaaagctcagacaggccattgcagtgttgaagaaacaggaggatcaggagtatctgacgaatcgtgaatggtccaaaccgcatcaaaccccggacagcatcaaacagcaggctgaaacaggacaaactttgcaggatgactccgcgaaacagacggaggatggatcgcaaaagaaatccgaatcgaaaggaaacggttcggattagtttttcttatcaagagaacgtttccaagtatcctttcgtaatagagaacgttatgatatattttggatacatgaaaattcattcatttctactattatattaaacgaggtgtttgcccagatgataaaacatattgtcctgttcaaaatgaaagatcgctcagcagaaagcattgaagctgcagctcaggtgcttcgcaatcttgaaggtaaaattgatgtcctggtttcacttgaaatcgggattgatgtgcttcgctcggagagatcgttcgacatttcactcacagcggagtttgcgtcactggaggatctccaggcgtatcaggtacacccgcttcatcaggaagttatcaagtacatgaacgaagtcagagaacagtcaattgcagtggactacgaaatctgatctttcattcaaactacgttgagataaaggggactctgcatgagcgatttaagagacgttatggaatttctatatatttttgttgtgtttctaatcgcttgtcctgtgatgatattctggcttaagcgaagagggaaacggaaccgataactcactgaacgggaagtgaacgaatgtattatgtgaacagagaacagattgcccgccggcttgctgctgtaccggaagtagctgaagggcttcgcggggcagcagaagcttgggatgggagtctcatgctgggtatggtacaggaacgttgtcttcacctggcgatcgagattgttaccgatgtgggaagttatctgatagacggcttcatcatgagagatgcaagcagctatgatgatattattcagattaattatgaagaaaaggtttttgataatccgacctatgagatattgcgtcagcttgtcacgttacgcaagccactggtgcaggattattacacttgggagcggtctgagctccatccacttagcgtagagttgccgagtatacttgaacattttactactcaggttagcgcctacgtggaaaaagaacttggtcctttcaatacggcacaggccgagggacagcgtaaggaatgagggaaatcgcatgacaaatgaatcaaaagaattcaatgaagtaaatactgaaagtaacgaaacaaatgaaacaccttccggattccatccggtgtatatggttgaacttttgttccgggaacgtccagaggtggatcgcctgcgtttgcaggaagctatgatccgtcatacaggacaagtccgactggatgtgaaacaagagagcggagggcaaaagcatgagatgcttgtcttctatcatctggaccacaaggtatccttccaggaaggggatatccctgctcagacttgcatgcttcctgtgaatgaaatcgcagatcgtgctcgctttggcggtgctctgcaacaagcatggcattggccggatgcaggacaagctgtggaagctgcgcgttactccattcggatacatgatatgttcacggctgccatgcctcgtaaacagcgcctggagctgtttcagaagactgtactggcaattatggagagtgtgacctgtgacgcgctgtattggtatggcagtgataagctggttgaaccggaagcatatacgcaagctcaggaacgtgaggaacatctgtatgcagccatgaatgttcgaatgtatcaagccggaggtacagaggaacagcgcgggttggtcatggataccgtgggattatctgcgctgggtgtacctgatgtccagtgtcacttcgtcggtcttgatccggatacggtggctcagaccttactgggtgcagcgtattacatatttgatcagggggatgttctgcaagatggacagacgctgggttcttcaggtggacgtcgctggcgttgtgaacatcaggcggcattgattgcacctggacgatatgtgattgatttggacccgggggatgagcatgccgcgtctaatctcgagccggctcgtcagaactgagtttaagccaagtcatttgcatccattcaaaaagggcgttcagattatttttaacatctggagtgtcaagtcaagcctgtgctgcttataatgcatcaacagagtaggcattcgcccggatggctgagcgacagaccgttgcttctagtccggtacttaaacaatagtaaagggagagatgtgacgtgaaggattctaacaaaagtttgttgtggggagctcttattggctccgtggttggttcagtaacggcattattgctggcgccaaaatcgggacgtgaacttcgtcaggatattacagaaggtgctcgtcaggtatcggagaaaggtcaggaactggctggtatcgtgggagaacaaagttcgcagatcgtatccaaagttaaagagactgcagatgtcgtaattcaggatattcaatcctggcgcaattgcgctgaagggaaagaaattcgcatatcggcagccattgttgataacgatatcgataaaacagtggatgaaccgggaattgacatcgtagcgaagcttcctgcggatgagtccaaggacgacaactaagcaaagcttgggataagcaggctttcctctatttagaggagagcctgctttgttgcgtgtccacacatagatgacgtagcgcgtggatttaatttgaaccctgcgatgaaatcgggtaagatgtaggtacctttttgccggaatgttcatacggtaggaagaaagctctgagaaacaatcgttttgagaaccaattcaatgaagaaggaagcggtgtgttcgtgcagcaagcaatcgctatattagactccggtgtggggggattgaccgtcgccaaggaagtgatgcgtcaactcccgcgggaaaagatcatttattttggggatactgcccggacaccgtacggaccccgttcgtccgaacaagtaaaacaatttacggaacaaatcgttgatttcttgatccaattcgatccgaaggttatcgttatcgcctgtaacacagcaacagcagccgcgttggagtatatccgtggcaaggtgaatatgcctgtcattggtgttatacatccgggtgcgcgggccgcaatcacagcgacacgtacaggacgtattggggtgattggtaccacaggtaccatcggtagtggggcttatacatcggcactcaagcagttgtccccctatattgatgtggtcagtcaggcttgtccggcgctggtgccgttggtggaacaaggtgaatttcgttccgagcacacgacacatacggtggaacaatcattgggcgagatcaaacaacagccaatcgattgtcttattctgggttgtacgcattatccctttctcatggacacgattcaggaagttatgggacaggaagtgaagttaatcagttcagcagatgaaacggcacgtgaaatcagtacgattttatatgataaacgaaagctggccagtggggatgagactccggtgcatcaatttttctgcacgggtgacccgagaatgttccagaatatcacccgtcgatggttaggggagcagatctccaagacccctgttgtctggcaggtaacgcaattatcatagttatattcaaattatgcatgaataagacttttaattaatgtattttggctgtggactatcccggaactgtgaagttccgggattttttgtcgtcattatgcattaaccggagataaacatgattcttgtcacatgacggacaacctgacctgcatacatatggtacagacacgaaatcggtcagaactggacaggagacctgtcttttcctgtggaaaggagaacaacatggatctacagtggattattgttcagcggggagatacgttgccgcgaattgcgtcagcacaccatatgaccaaagagttccttgctgcactaaacccggaagtggcttcccagccatacttgctggcaggtcagatgctgcgtattgcccccgggacaggtcgcagatacgctgtaccgcctggagaacgtgtaggggagattgcagggagatttggtatggacgaagaggtgttgcgccaggccaatcccgaaatcaccaatataaccgactgggttggtcgctgtattcatattccggcttcgaatggaaaaactattgtaaagattcagggagagtatggttatcgagaattaatcagggatatagacaagctggagaatcaatacccgtttattgaaacagggtccattggaacaagtgtcatggggaagtcgctgccttatttgcgtattgggcaagggtcgagacatatccatgttaatgcttccgttcatgcgaatgagtggttgacaacagcagttctgatgaagtttatcgaagagtatgccgaggcgtatagttcgcataggacatggcatcaataccagacagaacgctggatgcaagagacgacactttgggccgtgccgatggttaatccggacggggtcgaactggttcaggaaggtgtggtcaatcagcatccacatgcacagcagttgttagcctggaatgccaacagatcacattttacccattggaaggccaacatcagaggggtggatctgaatgatcaatttccagcccattgggatgaagaagcagcgagaagaggtataacctcacctggccccagggattatgcgggggcagcgccactgacagaaccggaggcacaggcgcttgcgcagtggacgcggcaacacacattcgatgcggttgtctccctgcatagtcagggacaggagatctattggaactaccgtgatctggaacccagagagagtggaccgctgtcgcgtagactcgccaaagcttccggctacaaggcggtgaagctcggtggcagtgatgccggatacaaggactggtttattcaagatttcggtagaccgggcttcacggtagaagttggattgggtgttaatccgcttcccgtagaacagtttgatgatatttgtatagaagtgggaatgttgctggctgaacttttatccaatggacaatgaggcaagaccccgaattacgaaggtgtgaaacttaacagtagatcattcgtataacaggaacggacgctatgagcgacgttccgtttttattatttttgataatgacagtctacatcattcgttctgaatggttttcgaacgggtaatgatggatgtgccatttcggcgacatatataatgttacggagggattcaaatgaagtggagaagactgctgtcgttcaaacgatggacacaagttttcaaaaggctcccccggctgctccgggctccgcagattcctttgggagaaaagttgttgtttattattccggcgctgttatactgggtacttcctgacgtaatgccgtttatgcccatcgatgatatcggggtcactttgattctgatgaactggtttgtaagccgggcagaacgtaaatatcctgtgcttcaggagggggcaccttcttaatttgcggcccaatggatcatattaacattgaattcgcatcaatgttattgcgaagagcggtaactttctttacaatagatgctgtagtttaagaatgctgaaattgttgaaatctgcaattacaatataggagatgaagagaatgaactgcaaaattacgcgtaatgctgctaaagtattgaagcttgaattggacaagccggagaacgaagggaaaaacctgcgcgttgtcatcacccatgcacatggtgaccatgctcactacgggcttgatatcgacacaccaaaagaaaatgatacagttgtatctaccgataaagagattgatgtcattctcgcgaatgatcagcctttgttgaacggtgttaaaattgactacctctacttcccggaagagggatttgttattacgaatccatcccaaggtaatcacggcgaccactaagggcgcgaagaaggggaactcatggctaacgatatccgcgtatgcgaaaaatgtaatcatgtccgactgaaatcgattgtgcccaagttgcaaaaaatggctccagacacggagatcaagattgggtgcaaatcctattgcggtccttgcgcgaaacgtgcatttgtctttattaatggtcggtatatcagtgcgccgacagaagaagaagtgctcgccaaagttgcaaagttcgtgaagtaataggatataacacggtgagtggagaaaactgtccacacatcagaaaggaggggctacgtgcctctccttttttgcgtttgggtagcagtgaaaggatgtgttactccatagcacctttgaccaactcagtaatttggaaggtatcttctcgaatttcaatggcaatgacggtagtatcctttttcagaaaatgtacatgccccattcgttcttcctgcaattcgacccaacctgtatccgctaacttctgaaaataatccattggcgggtagagtccttgctcacccccaatatgtttcagctcatacttaacaccttctttaagagtgggatgatcggaataagctatgttttcaataagttttgcattggttggaaccgggatgtctgggttcatggatgacgctgtatatccttctatctcgtatgttgcaggagcgcagccttgtacccaaatgagcaagggcaacatgcagagtgtcaatattattttcttcaaatgattgcctcctgattcgtcatgattatctaattaacgtagtgtaatcaactaaagttacgataaaaacacaaaagaagaataaggaaggcttgtgttatccatcctaaaggggtaacaggaacatgataatcccaaggaggaatactcatgccgaagcgttatgattccagtttgcaagccgataccaccgtatctcaggcgcaaaatgcggtgaacaagcttcattatgctgtatctcaggccctgtctcatccgacggcacagaccattttacaggcggaacgtcgtctggcacatacggagcaggcgatgcgacaagcagagctttcactcggagggcaaggtgttgagttggcagaggaaatgttcatcgaggagaagagaagattgaattcaatccagagtcagcacggtcaagggaatttataacgttcctgtcacatcagaacccgcagggcagtaatgctttgcgggtttttcatatcttttgcaaagactctcgatcatgggtttactcccacagtatgtcgaatggccgcttaaaattctgtgagaaggttaatagaacaagagcaggcaaaattccatacgggaggtacagaatgacaaaacatattacagattgtacgattctgaacaacggagtaacgatgccatggctaggatttggaacatataaagcaaaaggtaaggaagtacaacaggcggttgagaccgctttggaggttggatatcgcagtattgataccgcgtccatctatggcaatgaggaagaagtgggacaagctattgcaagcagtggtgttgcccgtaacgaactgtttgtgacgaccaagctctggaacgaggatcagggatttgattcaacgttgagagcatttgaagccagtcaaaaggcacttggactgaatgtgattgatctttacttaattcactggcctggcagagaccagtataaggagacgtggagagcattcgaacgtctatatagcgaaggaagcattcgtgcgattggtgtgagtaactttcaagtacaccatttgcaagatatcatagatgaaggtggcacggtgcctgcggttaatcaggtagagctgcatccgggtctgatccaacaagaactgcaagatttctgcggggcgcagggaattcaactggaggcttggagcccgatcatgaaaggtaagctgaaccaagagtccaccctcaaagcactggcccaaaaatatgggaaaacaccggcacagatcattctgcgctgggacattcagaatcagattgtgacgattccgaagtcggttaccccggagcgtattcgtgagaatgcggacatctttgactttgaattgacaccggatgagttgagacagattgatgcacttgattccgataagcggacgggtccacatccggatcaactgttctgggattaagtgggtagacgctaattgaatataagtgtttgatgaactacttgtggttgttccggttacggatcgttcttcgtgggtttaagatgtagcataatcggtcacgctaagacactacttgtgcagaacaatctttcgatcgccgttatccccggatttttttgaaattccctgtatcaagggagaaatccggtgataaatgcgagcgctccgcttctccagcttttttctgcccactccgttatcgtgaaaattacaaatccatctttagatttggtgggtaattaagaagtataaaaaaaagcaacaggatcaggggatactccctgatcctgctgctttttttgtgaattggcttaattttttttcggtacttcgcagccgtcatctgtgcagatgccactgccgtctgtttctgttgtgttggattcaaccatggtgaatggggaacggtcgtcccatgctttttgaatggcatccaggaacacctcgtcaggctgagcgcccgatacggcgaacttgcggtcgaatacaaagaatggtacaccgcggataccaagttgctcgccttctgcttggtcagcacggacattgtcggtgaattgatcactggacagcactgccgcagctgcgtcacgatccagacctacttcttctgctaactgagccaacacttcagtgtcgccggagtgtttaccttcaataaacacagcttggaagattcgttcactcagttcaagcgctttgccttgtgtgtctgcccagtgtgtcaagcggtgagctgagaaggagttcgtagggatcatggcatcgatattgtattccagtcctgccgtgcgagcattggcattcatctgagcattcatacctttggcctgttccacgctaatattatatttggaagccagatattccgtattggttttgcctgggttcaatgcagcatttggatcaagctcgaagcttttgaattgcagcttcacttcatcacggtgtgggaactgttccagtacattctccaggcggcgtttaccgatataacagaaagggcacagaaaatcagaccatatctcaatattcattttattaaaacctccatcattcttctcttttagttgaaactaatatggttacaattataaagccactttctataattcgcaaggagattacttattatcccgatatgccttggaccaatggtacggttgaatctcatccagtctcttaaagagcagttgaccagaaggatcgtatacggcagctttgacttcttcgccccagtaaaataatcgttcctggcatacaccgcaaggtgtaagaaccttaaattctgaatgctcgtcatcacgagcgatacagagggagtgggtgacacgttcgttcaatttgtgggcttccagataagctcctgtttccatacacagatgcgtggcatcgttgatgacctctggagctacgctaatcagcagggagccagttttggtatagacggcacccgcaccgccccatccctgaggataacgttgcttcacaaattttgcggctgtatcgaacaattgctgttcaatattgagtggttcagtgtgtgatgtcatgtaatgcaagttccccttttttaaatccaatttaattcatttcgtgtatttgtttagcttgtcattacgatattgttcattgcgatgttgctgctccactgtcttcctctcgaaagcgctgaatcaaatcataagtaatgaccgtgtccgagacatgcaatcgcttggttgcttcatcatgaccggggcggcaagcattgatgtccgttttgtcacgtgtggacaggtcataacaagcaccgctctcatagatataatcatccgatggaatatagaatacagaaccatccgagaatgtgccattacgtagcacaaccgtacgcccagacccgtcatatacgtcgttacccatatgataataggactggtcggataagcctagcaaatgcagtacggaaggcgtgatgtccagttgtcccgaaggttcgttgatggttccggcagttgctccgtccggtaaatgcacgagcaggggaacctcgttcatgatctgtgtcatatccagttcgttcagcgaacgtcccaggaactgttcgtattgtgattgttccttaattgagttgtcgtggtctccgtagaacataaaaatggtattttcccataatccccgatttttcagatcttccaccatcttaccgagtgctgaatccacgtaatgaacggattgcagatagttaccaaacatggtcccctggaactcgcctacatccagttgctgtttctctttaggcaaggcgtatggatggtgactgctgagtgtaatgaggaaggaatagaatggttcggtcacctcactactcattttctcaacggattgccggaaaaaggattcatcagacagggaccagccaagcgggtcatcctgtgcaaaatcatttttactataaaacttgtcgtacttcatgttctgatacatcgtataccgattccagaagccactctcataagcgtgaaatacgttggtgctgtaaccgttatccttcaggatggaaggaagggaatcatacgtatggtctgcataacgtacaaacgctgatccaaccggaagtggatgtagggaaatgtttgcaccaaaatcggcatctgacgttctgccctgaccggtctggtggtaaaagtgactataatactggctttccttcatcagttcattaaaatggggcgtgatctcctgaccaccaatgctctggccaatcatgaagttcataaaaccctcaccctggacaatgatcacattgctgtctttatatttgccaaacaaggcatcattctgcggggcagttccttgcctttcagcgaagaatgcctttgcttgctcaacatcagcgggatcagcctgcggcccggagccgatgtggtctttggcaaagttgtacagatcataaccgtgaaaagcgagcagtccggtcacattgtacatggatacattccaccagttgttatcgaacaggcctttggcccatgttttactgtagaaataaatcgggccgacggcgaggccaagtcccagcacaagggcgatgctgccagccgtgagacggcggcgcaaccgtgccttgccatcgttgtacgaatacctcccatagccatgaacagacggactggtgtgcttcgaacggtaacgtctgttgaatagtacgatagctgcgaacggaataacgacaagccaatcagcaaagaaccagagatcgcttgtgtagattagtgtagctatgctgtcccctaatgcgtcaacttgtctggcttgcaacaataccgggatggtcaagaaatcctggaaatagcgataatacaccatatcggcgtagattagtgcggtaagcagcaggttaagcaccacgagagacacgatcattcctctacgtggcaggaaccaggtccagaaggacaagagtagtaaagaccctatagcgatgactttatccagcagtcccatcgtaatgttataagcgtgaagattgtgatggagccacatgagtttgagcagcatgagcacaagaaaaataagatataacgttaatggatgatttaaaagcccgcgtggcatggagctgcgcgtaggccgagtgacaaccatatgtatgtcccccttgcttttgttgttttgttatcggaatgtaaaatagggctccatccattatagcgtggcctcatgtgttttcaactatgcctcagggagaattgaatcttgtccagccgaagaccgaagtcggtgaattcttatgaccagaaaagcgcacaaaaaaagcgccccggccatagatggcaggagcactttagattcgaaataattatgaagattgtggtgttttatttcgtgggggcagtgggcccaaatactgatagtactgggtttcaattcgtccgttgaacaacttgcgacgtttgtctgccttatgaccgaaatactcctcaaaagctttggttgacgtgattgcaaaaaaggaccatgttggcatgtcgaggtaactgcgccctaatgagcggagcaacttctgaacttctttttcttcactcaaacgttcaccatatgggggattggtaatgatgacaccatattcaccctgtggtctagcgcgatgagcgggcaggacgctgacttcaatatctttggcgaacccagcacttttgatcgctgccatagcaacttcaatcgcttcaggatcaatatcgctacctgaaatttgtaacgggacatcgtcacgtacagcatcaaatgcttcttcgcgcgcctgttcccacaattcttcaggaatgacagcccagtcctcagagttgaaggtccgacgaagtcctggtgcaatgttccagccgatcatagcggcttcgatcagcattgtgcctgatccacagcatggatcataaaatggacgggatacattccagcgactgagctgaataagagctgcagcaagcgtttctttcagtggcgcttcagtgacgagtttacgataaccccgtttatgcaaacctggtcccgttgtatctaaagtaagcagggcgcgatcgttcagcagaatgacctcaatcacataacgagacccatcctctgggaaccactctgtgtcataagtcagcttcagtttctctacgattgctttctttacgatcccttgtgatgcaggcacgctgctcaattgagatttttgagaacgaccctctacaggaaattcgccgtcggctggaatccactcttcccaaggcaacgctttggtgccttcaaacaattcgtcaaaagtcgtggcagggaattcacccattttcaccaatacacgatccgaacttctcagccacagattacaacggcaaatatcaatataatctcctgtgaagaaaacccggccattatcgatcgtaacatcttcataccccagttgtttcagttcccgggcaacaacagcctcgagtcccatcgccgaggttgcaatcaattgcaattgagccatgtgattcatttcaactccatttcaagctggagaagggaaatccttctctctgctgtatagtgacggtgccgccttgccgctttccgtgaaaaaacttacaatgagaaatgcggtgaacgtatgcacgcctctttcgaagtgatgcatcagtcaaccgcctgtgttgataacaaacatttattatagaacattggcatccatatggaaagcagtccaagtgtccaaggaggattttagtggtgaatctgacccctgatgaatatgtaaatcaattatttcaagaggatgaccttttgctaaaagtgaaagaggctatccgttcgaacggtatgccggaagtttcggttgctgcggcatatggacgattgctcacgtttctagcgaagacatccaaagcagaagctgcgctcgaaatcggcgtgctgggcggttacagtgggatctgcattgcgcgtggtttgcgtgagaatggaaccctgacttcgctggaactgaaagaggaatatgcggcaatggcgcgtggtcatctggaggaaggcggttttggcgaaaaggtggagtaccgcattggcccggcggcagacagcctggagcaattggagcaggaaggtcgcacatttgattttttctttattgatgcagataaggagaattatccggtatatcttgactatgccattaagctggctcggccaggtgctgtcattgtaggtgataattgtttcctgcgtggtcgtacgctgaatccggacaagcagggcccggccgtgcttgctgttcgtcgtttcaatgaacagatggcaagtgacccgcgcctggtgacgaccatgttgccggattacgatgggctggtacttgcctgggtgaagtgaggagagaaggccatagaacataacctgacttaataaaaacacctggcagctcaacattttaccttgtagtaacttgtggtagtggggactgacttggaggttttcaggtatgtaggaaacgttggtatgcctattcaggccaataaggcgctgaaagcgactttttctaaaaccaagaatttatatattttgggggtgagcgaagcttaccccttatttgtctttcgttattgacgattgaagttgtggttaaggacatcctttcaccaatcgttgcttattagatatgaaagagaagcgaattgatgcatagaacctatggatttaattaggataattatgggatttggtagaggtatgttcctgtttttatgagaatgacgttagaagttggaatttaatcgtcaatataagacatgaaaagacaaaatacacccatttacgaaatgatagggcgtgcatcataatcagataatctgagatggtgggggctaatcagaacaagctagaataattatatcagtatttataatggtgatcaatatcatttgggtgaggagagaacaaagagaatgaactggaatagagtcgttaaaacgctgctggttttattggttttggtaagtgttggaattgaaccttccgcgagaatctatgcggatcaaacgttaaacaaacagccattgatttatgcaggagggaaattttcgggggttgttaattcagatgggtcagtttggagctggggagataacggatcagttgttatgcaacaaaataatagaggaaggaaattggggagaggggcgacggaatcagaggtaaatcccttgccgaagttagcaagcttggtaacagtaaaacctgttcaaatcagtgcttcttctgatgcaacgtatgcattgagtcctgagggcgaaataatagcatggggttctaatcaacatgatttgctaggaaacggaggtcttgatggaggaatgccttcacctgtactgatgagtagtcatcagaaactatcagatattatttccgtagacggtggagcacatcatggaactgcacttcgaagagatggaacggtatggagttggggcgggaaaacttatcaaaaaataggcaacgataaaacttcaagagctgaacaatacgcgactcaagtaaaaggatctggtggcgtcggttatttgacgaatattacttccgtatcagccggtggggatcatacggttgctgttgctttagatggtacggtttgggcgtggggccaaaataaatatggagagttaggtgtggctacgccgggcagtacattgagttattttcctttacacttaggaacttcttttaaccaggtcaaggctgttagtgcaggtgaagatttcacggtagccttgaagtctgacggcacggtatggagctgggggtggaatttctcagggcagcttggcgatggaacgacgcaagatcgtcctgctcctgtacaggtcaagggtcctggaggacagggttttctggatcgaattgtagccattaaaagcgggggccaccatactattgctttacgtgcagacggaacagtctggagttggggaaacagtactgaagggcaacttggcattggtacgcgtgcgtccaggaataccccggtgcaggttcaattcaagaatgaatcgggacaattaattaagatccagagtttagatgccggtttcgaacataacattgccttatctgaaaataatcaattgttcacctggggaaacaatagtcatggtcaattgggtgttgggggtacaaaaaatcggttgactccggtcaaagtagcttggcaagatagcgttgctacttcagaacccgcatacactacgtcatatgtgtatgatgccaatggaagattgctgcgcaaaacgatatcgcgtaaagacgggacagcttcaacaacgtaccaatatacctatgaccgtaacggcaatctgaagcatacccagatcattcaaccttagcaacataaaatcagaagaaatgatcatatagcatcttacattcagtttttgaaacggagagaagtccagttgaagcctattatataccgaaaatatctatccatcattctcatcatcgcagtcatcgcagggctgtttggaaacatggtgcctgccgttacatacgcagaagagcaagccgaacaagtagaacaagctgtacctggtgagcaaggtccttctccatcggaagtcattccgctgattgcggagcagtttgacaagaccgaggatttcatccagaactatctggatcaaggatacaccttgaatgaagtcattaccgctttgtacaaagcaagagaggaacagattggaatcgatgaagccttacaggccgttcgcccacaggaaatcaacgaatcggatacagtcactagcgatgtatatatcgatcctgctgtagctaccgaaacgccaatcatcggcgtggaagccgatcaatccggtattatgcagcggtatgaaacgttcgtggtagaggaagaactgaccgccccgccggaaacggatctacagaaagatgacgaggcggaagaagaggaagaagaaaaaacggaggctgaggaaaacgatcaggccgatccaagtgacaaatcagatgaatcatcgcctgagggggaaacgaactccgacggaacattaccgccagtagaaacgacagacaatgctgagaatgcagctcaaactaaccaggatgtaggtcaacaaacttcagcgcctccaagcgaaaatacatctagccttgaagagaagcctgctgctgagcaaaaaacaacgtcatcgccacagggaaatgaagttagtccagcttctacacctaaggaatcgaaaactatttcagaaaaaataaccagaacaaagcctgaaaaaggactagctaaagagaataaggatgcttctgttacaaatgaaaagcaatcggaggtctcatcaacacgaaagcagaaaacgaactctgatgcgaaaccgctggcaggacaaacatctaccagcatcccagatccaggaaagcatattgcagaaaaagcaccggtctatagcaaaaggtcctttaatgaggccccttatacagtgggtgaaaacggagaaaccatttcgacattaagtggcggccttattttagagcatgttgatgcgtccttacctggccgtgcaggcatgtcatttgcactagaaaggcaatataactctaccttagctcaattttatgatccagttgtaggaacgaatacatatgagtatccggtctataattattttctcacgtaccaggcagccaagaaaaaaataattacaaaatatcatgtcaaatacaaattaaacaaatgggttcaggaagactacaatggcgatggagtaaaagataatgacacgatcgttgtggagactccgactgtattacaaggcacgtatactacggaaactgaagctcggaaagcggcaaatacccagatcgtattttggaatccgtctgaaagtcgcatagagcaacagacccgtagcggtagcctgagtagccttcctacgagcttaaactatagtcagggtggatacagcgggactctgaacaagtcaggtagtgcacaggtcatttctggacaatatcagcctgcccgtacgattaacgctccaacacaaacttgtaccaattccatcccaggaaaatatgatgccaaaggcaactggacgcaaaccagtacgggtagtccatgtccggaaacaaaaacagcgactgtggaaggaaagacgctcacgctcacccgttcatcggtgacagctacgaaagcttgtccatcaccgaataaatcggtagcgaactatgtgtgtacaaaaacatgggaagctcgatatgatggatcagtatctgtaccagcttcagacacccgaatttattctcaaacctattcgggtaatgtcgttaagccgggccaatattcttcagaacgttatgatccttggattgcaggtaaggctccttaccagtatcgtcatgcgtacgcagtgcgagaacagccatgggtagagcaggaaattacagaaggccccggtgaaaccattactttattcacggatggtacaccggactggtccacagtaaacaatttgaaaaacaacgtgaatagtaatcctggtaaagatatttcttcttctatgatggatagtggttacaattattatcttgcctctaatccgtctgcggagataagagcgtaccaagtaggtagtaataccgacgtcacatactataacaaaactgtacctgccgcagcggacaaacgagcaccgcttggcaaaggatggtcttggaaactgccttatattgaaaccgaaaatagtaaatcgtatgttgtcatgacagatggtggccgctacgaaattgcaggtaatacgctaaaaggctatgactgggaaggcatcaccgttcgtccggacacttcagtcaaggtaggaggcgatgtatctgcgcaagtaatcgtttcagcagatggactgagtaagcagtattttagcgtagatggacggttaatacagttatcagattcccgaaataatgacattcaattcttctacgaattcaatacagcatatcaaagcaagctactaaccagtgtgaaagatgcattgggcaatacaatccaaattgcttacacgccatctgcagtgacaatcactcaaggtgagcgaatagtcacttacaacaaacaattgaaaaatggcgtagaattactcgattctgtcattgacccgcttggtcgtaaaacgacttatgcatacaaacttgcggatgccaaattcaatctgctaggttttagcccagaacgggcaatatctaatccgtacgcattattaactggggtgcagcatacaaccggagctaaaacggtgtatgaatacgaaaatagcccggtgcgtcgttacattggggcagattccttaaatgaagcataccgtgtactgactcgcaaagaccaaatcttatatgagagtggaaaagttgaggactacaatcgacaaaccgttagttatacgtctgatctgggcgcaagctatggacaaaatgctacgtttagcacgattatcagtagcggcttgaccgagagtcagtcgacatatcggaaagtatttgtgaatagcgaaacaccaatctcattttataatgatcggaccgtgctaagtgccgatgggcgtgtggagacgtcaacgtatacgtatggcaaaaccgtcaagggcagagcctatccggttgccattccaacagtgactacaattaaagataataagacaaatgaatccttgaccactacagtgcaatacgacgactatggcaacgtgacgtcgatgacagatgcgacaggaagagtagtaaccagcacttatgacggtacgaggcaatggctgaccagcgttactgaattagtcgatcggagcaataagaaagttacaacactcactcgtagtgcgcaaggtgacatcaccaatattgtcagtcgtcaaggtagcaacagtggcgatctgttgcagcaatccgattatacctatgatgcctatggaaacttgctgacccaacgtattacaaacgatacacaggatcaagtgaccacagtggaatacgatgctaggtaccaggaagcttttccaacaacaactagtatcgctgtgacggacattaacgggaagttgagtaccgtgtccactggagctcaatacaatccagtaagcggtaacttacttagttcaacggatgcggcaggccgtacgactcgttatcagcaggatgcaattggtcgaacaatcgaagtggtccaaacggatggcagcgtgttacgtgcctcttacgatgatatcggcaataaaatcaccgtcaccgatgaaaccggacagcagcgtgtcactcaatggaatgcgcttgggcaggagattgaatcagggtactatactggaggaaactacgtggttgctagccgtaccggctatgacccttacggacgtacgatatggtccgaggatgctgtaggaaatcgaacccgtgcgcagtatgacagctggaatcgcattatttccacgacaggggccgatggtgctgcaattaatgtgcaatttaatgacgctactcgtagtgtgaccaccaccgatgccgaagggtacactcgcattcaaaccgctgacatgtggggtaacctattgcacgtgcaagagaaaacgcaacaagagaattcattgcgaacattggagaaatataactatgatgtgattagtggaaacttgctggaaaaaacggatggcaacggtaatattacacaatatacgtatgatgtgctctccagacccctgatggtaaccagccccaatggtgagcaaacgacctacgtatatgatcgtctaggcaatctggttcaaacgactgatgccgcaggcaatgtgaaaaaacatcgttatgatgagctgggccgccgaattcaaacgacggacaagttgggtcaggcaacccagagtatctataatccggatagcagcctgagccagtttgtggatcgtaatggcaatacgtttacgtacgtttatgatgcccgaggcaacttagtgagcaagagcagtccggaggaaacgatccgcttcaccgttgatgcagtaggcaaacgcacaagcatgattgaccagacgggcacaacgacatacgagtatgatccagccaccgagatgctcactcaaatgagatatccggacggtttaaccacaacatttacgtatgacttgaatggtaaccgtaccactatgacagggccattcgacaccacggtatactacggttatgatgcaatgaaccgtctgacatcggcaggtacatcgccagaacgttcggatgcgaaatacagctactatctgaatggattgagcaaggaagcgacgttgcaaaacggtgtacgggacgcaaaacagtataatgggctcgatctgattgaactgtcacaaaagagaaatgagacgaccctgcaaagctatggctaccgctatgacaacaacaaaaatatcctggatcgtactcagatcggttcacaggatacgtttacgtacgacaagctggatcggatttccacctcaagcgtgaatagcgaggagtacgcttacgataaacaaggtaatcgcttgacccaaacttccgatgctgaacctaacatttcagatgctttgtatacgtacgatatgcggaatcgcctaacgagcgtacagaaaaacggtatccaggtcgattacacgtataacggcgacaatctattagtcgagcgtgtggagaacggcgtgacaacacgctattattacgatgaccacgctcaaattattgcagaagctgaggtcaaaagcggtacaccagtgctgaaagccagctacatccgcggagcaaaactcgaagctatccagtatggtgatggtagcaaagcgtatgtacaggtgaatgggcatggcgacattaccgagctgcgcgacgtgaacggagaattgctcaatcgctacgattatgacatctggggtaatacgctgtctaaagaagagaaggtgcataatccgttccgttactcgggtgagttgtgggacgacacgactgaattacaatatttgagagcacgctggtataaccctgctgaaggtcgattcctgaatgaggacacgtataatggcgaactcgatgatccgctgactcaaaatttgtatacgtatgtgcttaacaatccattacgctatgtagaccccaccgggaataaacaatgcgaaggagcaaccacgtgtgaaggcgattcggtagaaacgaagttaagaaatatgatttacaacaaacttcaagccggttcgtacaataatgtggatcaatttgcttacgatattggaacgttaatgattcatattgatcaaaaaaaggctggattaacatttaatgcggatacacgaaatctatatcgtaaaatggctaaattggcggtgtatggggctgaaaatgaggttcgaacatacgggcaagtcgatatgggcaaccttgcagcgttattttttgtaggatcggtaaaaggagcagcctccaatgttcttagcggcaggttcaactcttgtaattgctttattgccggaaccaaggtactgacatccgaaggagagaagaatatcgaagacattgaagtcggagataaagtcctcgcgaagtcggaatatgattcagatggagagttggcttacaaggaagtcactactttatatcgcaaccaacgtgatgatatcattaagttacatgttggagagcaagacatcgagacaacaaataaccatccgttttgggtggaaggcagaggctgggtgtttgcagatgaacttcaggtgggtgacaatcttcaaaaggctgatggaagtaatctaaccattaacaaagttgagtttgttaagctggttgagccagtaacggtttataactttacggttgcggatttccatacgtattatgttactgatttagggatttgggtgcataatacaaattgtttcactggttcgggcgctgacttagctaggctagccaacaattctaagagtaacgatgggctttcaggtactgcacctttaggtacagtttacgatggtgcgaaaagttttgtaggttctaattatactacgctgaacaaaaacggatatacatggtattatagccagaatggtacaaaacgagtgagagttatgaataaacagggaaaagatggtatacttgaagccaattttgagacttttaacgaaggttttaaatggaataaagtaggaaatagactaacaaattatcatgttgaagtaaaataaaagaaaagaagtgagtcacgtgataaaacctgttttgaaagatctcatcattactggagatcctaatatttatggaaaattgcaatttacagaaactgaagacatcggagacgacttttatttgtcgggcacagcttgtatcggaactgaagattctgatggtgaggataattttgattttacaatcataacgccgaaagcgctcgaaagagaacttggagatagttcagatatcatactgggtgcagggtgttttattgtaaataggcttgattttgaattgattaccaaacaaatcaaacaaattcttctaaaacatcaaggggagaaatgggaggatatagcaaaaagtcttgctccttatttcagctgggaatatactgattccgtacgtttgaatggtgaggaagagcttcttgagatgattaagagacattcagataagaccggagttgatccaacgttcccctgatcagagtgatttagagttaatgacatctcattgtgaatgtaaacgccatgagatgtccattgaattaaaatagcaatcaagttgttggaatttaaggcactaatgttttaattgactctgattggtttacctagtaaccttgttgggctttcgcctttcaaggttatttttttgcaagattcacgacggactgcaatataaaactcaatgaaacttgtggacaacaaatataaaaaacagtccatggtcggattcgtgtagaatgaactaaccaaaacaatcgatcacaaggagatgtggagattcccttagatcaattgccgtgagttagagcgtacagcttcatttcaagtctacgaaacagcagaagattagcatcttatcaggaatgtcgtgagtttttcaatgcccaaaggtaagtggtccgataccctggctgcttcgctggaggaaaagctcgaggccaactggcatccagagcagattacgaacttttccgcgcagatgtcctgtctgtggtctccttctaaaccatctataagtggatttacacagggaggttggttggaggtgtgctacacgttctcaggcacaaaggtaaacgttaaaagcccgcagaaactcgcggtaaattcatcataggcagaaacatctcagatcgtccaaaagatgtccgttctcgtgaaacgtttggacattgggaactgggtaccgttgtatcgaatcgtgggcaaaagtaaaggatgcgtagtcacactcattgaacgtagaatgcttctttatttcgctattctcatgcctgatcgtacagcaatgtccatgaagattgcggcttggtgtagccatctcagaggtactccaagggggaatttctcacggctacagctgaccgaggaaaggagtttgcatgctatgccagtctggaaactacgcataacctgcacgtttattttgctgatccgtattcctcttggcaacgcggttccaacgagaatgcgaatggtttactacgagagttctaccccaaaggtacagatttcactcaagtggaggatgaagaactcgcacactcactcgatctaatgaatcacagaccacggaaatgcttgggttggaagacggctcacgaagctttcacagaggaactgtcgcacttggtttgaaaatccgtcatttcattttcttaacgtatacactccgtttttaataatgcccgtttatattctgctcattgcaattctggttttcttgatttttttgagcacacaaagaaagagatgacaacattttgaatgatcaaaaatgtgtcgtctctttctttgtatttacagatatatcgttacagtagttctatttagacttcaggtgttccgtacgtttcaaaccattttttgatggtgtcaaaatcatcactgaaggacaggcccagcatcaataatacacgagcttgttgtggactcaggttgtcgcctgcaatgatacctttgccgccaccgtacacacttcctgaacccgtccgagtggtggtcacaaagatgacaccttcttcaatggctttggtacgagcttgtcccatagctctggagataccgccagctccggtaccggaagtcacaattcctttggcaccgctgctcacgaatccttcaatggctccgccgccagcttcttgatatgagatcgcaatttctactttggccagatctgcctttgtgattttacttagatcaaatgcgggcttcgctgtgccttcaggtttcaaggcacgtgcaggagcacggtagattcggatgttctcttcatcaatatatcctacagcgccgagcatcggcgtttcaaacgtatctgtccgataatcatttgtcttggttacaccacgagcaagctggattgtatcattcaacatgagtactgtgccaaatgaagtggtacgaccactgcctgcaagtttgatggcgttgtacagattggcttgagcgtcagaaccgatgacggtccatggacgcatggagcctgtgatcacgacaggtttgtcactctgaacagtcatatcgaggaaataagcgatttcttccattgtatctgtacccgtggtaacgacaacactgtcatacgttgccagagctttgtctaccgtctgcgacaagtcatagaggtcggtcatgctataggaacctgaacctgagtttccgaattggagtgtgctaacatcagcaatcttctgtttatccggtaaggcatctaccatctctccaatgggaagtgtgcctgccttgtaattctggaagctggtggcatcctcggattgaccagcaatcgttccgccagttccgatcaccaatacattaggaagtgcagattgtttggaagagtctggtattgcagggatggaagtattgcgagctggagtagtagttgctgtctgaacagcacctgttgtgcctttcacctctaccgtagctgcgtgcgcggcgtaggttccaatgggggacaacgagatggtcaatgctgttaaagctgcggtactccatacggcccagggacgaagattggatgttttactcatgaatagcactctccttcaagtaagtgtgatgttaagtttgttaagaagaatatgtataccatttcaaattgattgtatttcatgttaaataatatgacaatcatagatgatggtagagtaatcgattacattcgtagataatgagagtaaaatgattatttatgaggaattacgaaagaatattcattctgctagagatatataagagctggttttagtaattttgaaggaaaacaaacccttttaatgttagttaacattacataatgagtcttttgtcctgataaatgaagcatttaaaaaaaatgtcgaattgggactcatatcagaagtaggtaacagaatgagaggatgatagtaacgcatattaggtaatggggctcaattacggtctaaagagtggtttcgttatagagttatgtttataataggggtgatcaacatatgtaaataaatatataatattgattggaggagaaacgatgaaacaggcaccgagaaagtatgcaaattacattccgattcgggaactggagactttggaagagaggttatctcccttcaaggtgtatgcagaacttcgtgatagcactccagtccgctatgatgagcatcgagaatgttgggatgtttttggttatgaagatgtgaagtacgttctgaaaaatccgaaactattctcttctgcacgtgatcgtgccaatacgagcatgttgacgacagaccctcccaaacacaaacagctgcgtgatctggtgaaccaggcgtttacacccaaggcaattgaagcattggctccgcgtattcaggaaatcacagatgagttaattgctccacacctgtcagaaggacatatggaacttattgatgaccttgcaacaccattgcccgtcattgtcatagcggaattgatcggagtccctgcggcggatcgtcaaaagttcaaagactggtctgatgtgttggtgaaaggcgcgcgtgacgatagtgagcaggccttccaggagttattggaggagaaaaaaagaaatatgcaggagttgcatatctatttcactggcattatggaagaacgtcggttgcagccaaaggatgatctgatctcattactgcttgctgcggagattgatggtcagcaattgacttcagatgaagtggtaggcttttgtattctcttacttgctgccggtaatgaaacaacaaccaacctgattaccaatgcggttcgcattctgtctgaacaacccgagctacaacaggagttgcgcgaacatccagaacggattacttctgcgattgaagagacgctgagatattatccgccaattgtcgcgattgggcgggtcgccaaggaaactgtagagttgaatggccagacgattcaagctggagagcaggtgatttcctgggttggagcagctaatcgggacagtgcccaatttgaaaacccggaagatttcatctctgatcgcaagccgaacaggcatatggggtttggttttggcattcatttttgtttgggcgcaccactcgctcgattggaggcaagggtagttcttcatacattgcttcagcacatgggaaacattcaacttgtgtctggaacggctctgcaaccgatacaaagtgcttttgtatttggtgtgaaacattatccgatagaattcaatctaataaataaataaataaataattaaatgaatggcacatgaatgacaaaagccgctttcaggcccattaggcgctggaagcggctttttcaaatgaaacagtaagatgtactcattaagaaatgatagggaatcaggattcccgaatagaagcaggtttgttatacaatttgaatcggacccaaaccatattaagcagcagcagtccaccagagacgataaacagaccttcgatcccgatgaatcctgccataaatcctccaatgatggctccaagcatgttgcccagcgccagagtactcgtattaaaactgaatgcacggctaatcatgctatcggatgtataggaacggatcagggcattaacgctcggaagcaggccacccatgaacacacccatcatgaaacgaacaagaatgagctgccacacggtctgaacaaatgcctgcggaataagcatgagtcctgttcctatgagggagaacgtcagcaccttgtgaggaccaatccggtcactcagcttcccgagaatcggagacatggccatattggatagtcccgtaactgcaccgacaagtcctgcccagaaggccacatttacatccgaagcatgcaatttttgcacatacagcggcaagagtgacatggggctaatcatcgcaaactgcaacagaaacgtcacagcaaacagtgcgggcagttgaggtgacttgttcaattccttcagaccggataatacggattgtgccggtagtttggctgcttcttgacggtcaaacttctctctcaccaggaacatggcaagcatggaagcaacaaagatcagtccacctgtaatgtagaaaatggggcggaagcctaccgcatccgctaacaatccaccaatgagtggacccaggatggtgccggcaacctgcccggactgactgattcccatggcaaaacccatgcggtctttcggagtggtacccgatatcagtgcaacagctgcaggattgaaaccggagatggtaccgttaagcaaacgcaataagagaagctgccaaggattctgtgccagacccataagggcaattacgatggccatcccgaatcccgaacgcagtagcattacttttcggccgtacttgtctgataacttgccccagagcggttggaacaaaaatgaggtgaggaaattggctgcaaaaataaaccccgcccatatgccaatttcatgttcgccaacaacgcccagatctcttgcgagataaagagacaaaaatggggtaatcatggtcatgcccgaattgaccaaaaattgtccgaaccaaagcacaatgaggtttactttccacgttttcaaagtgctttcacttcctttcaaagatatttctgtaattctcaaaaaaacaccattctttcattataacataattggcatatgagggatgggtgtaaggaatgtcatagtattgtcacgtagaacgcatctgcatgtggttgttacggctgtttaaaaagggcataatggtaattatgagtccaaaaactattggaggcttcttacatgagctataatgatcgactgattcgggcaagttttaaacaacaggtagaccgtgtcccggtatggtacatgcgtcaagctggacgttacgatcctgaatatcgcaaaattaaagaaaagtactccttgctagaaatctgcaaacaacccgagctggcggctgaagttacactcatgccggtacgcaaacttggtgtagatgcggctattttgtattccgatattatgaatccggttgcctctctgggcattgattttgacattgtaaaaaatattggtccagttattgataatcctattcggtccgctgcagatgtggatcggttgcgtcccatcgacgtagaaggagatctgtcacatattctggaaaccattcgaattctggataaggagcttgatgtgcctcttattacgtttgcgggcgcaccattcacgattgcgagttatctgattgaaggacgaccttcgaaaggttatatccgcaccaaaacgatgatgtacagcgagcctgaggtttggcacaagttgatgcagaagcttggtgatatggttattacatatgtccgtgcgcatattgcgaatggcggtaaggcattccagttgtttgacagctgggttggagcactttctcccaaagacttcagaacatatgtgttgcctacgattacccgtatctttaccgaattatcggatttgaatgtaccgaagatttatttccctggtgttgcatccggtgagttgttgccagcactgcataatctgcaagccgatgtgattggactcgactggagagtatccatttcggaagggcgtcaacgtcttggtggcaagtttgcagtacagggtaacctggacccatatttgctgactgccccgatggaactgattaaagagcaagccaaagtgattattgacgaaggaatcaaggagccgggttatattttcaacctcggacacggattatttcctgaagcatcgctagagaagctcagagaactaacggcttatattcatgaatattctgccgaagcattgaagactggggtgacggtatctaatgactaatacgataggtgtactggtgatgtcgtatggcacaccggaaaatatggagagtgttgaagcgtattacacacatatccgcagaggacgtccgcctgaaccagagcaattgaaagaactgacggatcgttatgaagccattgttggcggtgttttcccacttcgggagaacacagacaatcaggtcaaggccctacaagagacattaaatcgcgatgagcgtggcactgatgtggaattccgttgttatcaaggtctgaagcatgcctatccgtttattgaggacggcgtggaacagatggcgaaggatggaattcagacagcgattggtattgtactggctcctcatttctccacgatgagtgtaggcagttatatcaaacgtgcgcgtgaaaaagcagaagagctgggcgttcatatgtcctttattgagagttaccatctgcatccgaagttaattcaggcgttgtccacacgtgtcagtgccaagttggatgcgtttgaggaagctggagcaaaacgcggagatgtgaaggtgttgttcagtgctcacagcctgccggcacgtattgtggagatgggtgatccatacccgcaacaattgctggagacttcggaagtgattgcctctcgtgtaggaataaccaattggcaatttacgtggcaaagtgccggacgaacagctgagccttggcttggaccggatattctggatacgttacaggaactttcgcgtgaacaggtagaggatgtgcttgtggcaccaatcgggtttgtctcggatcatctcgaagtgctctatgatctcgatattgaggccaaatcgattgccaaagagatcgacatgcgcctgatgcgtattgattctctcaatagcgatcctctatacatggagacgttaagcgacgttattataagccaatggcagcaagggtcggatgagtaatgggtgataagaaacgccgtgttgttgttgtcggcggtggccttaccggcctcagcgcggcattttatatccgcaagcattaccgggaagcaggagttgagcccgtgattactttggtcgagaaaagctcgtccatgggaggcatgattgagacactgcaccgggatggatttgtgattgaaaaagggcccgattctttcctggctcgcaaaacagcaatgattgatcttgccaaagaattggagattgatcatgaattggtcagtcagaatccggagtcgaagaaaacgtatatcatgcagcgtggcaagcttcatcctatgccagcaggacttgttctcggtatcccgacggaactaagatcattcttgagaagtggtctggtctctccggcaggcaaactgcgggcgttgatggattttgtcatcccgccgcgtcgtacaacagaggatgaatcgctcggttatatgattgaacgccgtcttggagcagaagtgctggagaacttgacggaaccactgctcgcaggaatctatgcaggtgacatgcgacgattgagcctccaggctaccttcccgcagttcggagaagtagaacgcgattacggcagcttgatccggggcatgatgacaggccgcaaaccggctgagacgcataccggaacaaaacggagcgtttttttgaactttcgtcagggactccagagtcttgttcatgcactcgtccatgagttgcaggatgtggatcaacgtctgaacaccgcggtgaagtcactgcaacgtcttgacgaagcggagaccagataccgtgttgaactggagaatggtgaacagctagaagcggatgatgtagtggttactgtgccaacatatgttgcgtcggagctgctgaagcctcacgtcgatacagcggcactggatgcgattaactatgtgtctgtagccaatgtagtgctcgcttttgagaaaaaagaggtggagcatgtattcgacgggtcgggtttcctcgttccgcggaaagagggccgtaatattacggcttgcacgtggacatcgacgaaatggctgcatacgagcccggatgataaggtgctgcttcgctgttatgttggtcgctccggtgacgaacagaacgtagagcttccggatgaagcgctgacgaatctcgttctcaaggatctgagagagaccatgggtatcgaagcggtgccgattttctccgagattacaaggctacgtaaatccatgccacagtatccggtgggacacctccaacatattgccgccctccgtgaggagcttggtagcaaattaccgggtgtgtacattgcaggtgcaggttatgagggcgtaggcttgcctgattgcatcagacaagcgaaggaaatgtctgttcaggctacacaagagcttgcagcagattaagtacagcaagagagctgtctcaaacgtagaattatctactggagagatggctttttttatgtgaagatctggaagctaactgagttcataccctttcaatcgatacagttccaaggaatgatggaaatccagaatatgcctgatataatggtatgtatggctgtgaagaagaagaggagttgcttatgtatcccccaagatcagagcgaagtgtaaagaagaaaaaaggtagtaaacgcacccgcaatacaatcacaatcatctggacagttaatattgtattgatcattgcaattggtctggtgggcattttttatgtcattaatacacgtcagcaacaggcagaccagccggtgaaacaagaaatcgtcgatcaggatcagccttccattggagacgatgccaaaggcggcgatcaagtaacttctccagactcagaatccgatgagacttcggaagaagaacccgaagctacggatgaagagacaacagcggatgcagataagacatctggagtagcgacacctgacacttcaggcaataccaatagtgagaaagcagaatccggaacgaaaaaacctacggcagattcgacaccgtccggcaccaagggaaatgcaggtgtggatcaggaatcagggacgtcgaaaccttccaattcagcgaaggatgtcacgattaactttgttggtgatattcaattttcgggcaaagttgctgaactgctggataaaaacggttatgattatccctttgccaaactcggcagagtattcaaggatgatgatcttaccatcggtaatctggagacaccaataactcatggtggtaccagtgcagctgataaaacctatgtctacaaatcatcgcccaaagcattggcggcaatggcctctgcgggttttgatgctgtcaatttggctaacaatcatattttggatcagggcgtagagggcttggtggatacgttaacttatctcaaggaatatggcatagctcacaccggggcaggtatgaatagggatgaggcctatgcaccagcatatctggaacgcaaaggcatgaagattgcattgcttgggttctcccgagttgtaccggaaacgagttggaaggcggaaggcaatcgggctggcgtggctgaagcctatgattccacaggagcagtcaaagcgatccaggaggcccgtaagaaggctgatctggtgatcgtggttgcacattggggagaagaacgtgtaagtactccgaatagtgaccagacccgattggctcatgagtttgtagatgctggcgctgatctggtcataggtggtcatcctcatgtgttgcaagggttggagtactataaggggaagtggattgcatacagtacgggaaatttcattttctccagatcaacaaccgaagagacttggaaaacggcggtatttcaggctcgctgtagtcaagatgcagcttgcagcatgaaagttatcccttatgaggccgggctaggtcaggccattccaatgattgatgaggcgaacaaactgctgttggaacagatggcaaagctctccccgggtattcgatatgatgggaatggagtcgcttcgcctaattaaaaacctttttgaggagggaatcgaatgaacaacctttgtgtagcacaccgtggattttcttctattgcaccagagaatacgatggctgcattcctgatggccatggagcggcctgaagttcagtggatggagctggatgtgcagttgtcgcgtgatggtgtaccagtggtcattcatgattttacagtggatcgcacgacgaatggcaagggtctggttcgggaaactgattgggctgatctgcaacgtctggatgccggagcatggaaaaacaaatcttacaaaggagaacggattccggcgctaagtgaattgttagatcgctcgtgcggcagagtgcgtttgaacattgaactgaaaacgcagggagacatgtacccgggtctgcctgcggctgttatacatgaagtgagaaaaagacatatgcaaaatgatgttgtgatcacctcatttgaaccagccgctctgatcgaagtgaagaaacttgcaccggagatccagacagggctgattatcgatgcacgaccaggcgatctgttaaccgccctgcggcagatgaattgtacattcctctcgattggatacaccaatgtagacaaatccttaatgaacgagatgcggagtgcaggcattcgggtgatggcttggacaatggatgacaagaccattatgaagaaactggcggcggttgatccagaactcatgttatgtacgaaccgtcctgacgtatgggagctggcatttcaggagacgagcagccgatttttcagaccttaactttactatatgcactaatgaatccgataaaggtggtaatatacccatgttgactaacattcgcaatgtatactgtgtaggacgcaattataaacttcatgcggaagaattgggtaacgcggttccggatgagccaatgatctttatgaaaccttcccatgcagtcgtgcccttgaatggtgaaacccttggattgcctgctaccaagggtgaagttcactatgaagctgaactggtcgtgcaaatcggccggagttatgagccaggtatggcggtagatgagctggtggatgcgtatgcatttggtattgattttacgttacgtgacgtacagaccgtgattaagaaaaaaggccacccgtggacagcggccaaagggttcagaaattccgctccggttactgcatttcaggcattcccgggtgcggcagcattactggagaaagactttacattgaccaaaaatggtgaggaagtccagcgtggtaatattcgtaacatgatctttagtttacaggatattgtggattatgtaggtcatcattacggcctggggccgggcgatgtcatttttacaggaacaccggaaggtgttggaccaacacaagcaggagatgtgctcgaactggcatgggacggcgaatccttgggggcctgcacgattggggcagcgcaataaggattacacatcatacctgcttgagatgaatagggtacaagaaaggggcgtgaatacgctcctttttgctgtgttatcgtggatataggtttatatcttcatcgtacggatacgctactaatttaggccaagctgtatgctgtgtttgcactccgcgtgaccaactcttccagttcagcttgttgtgcagcatgttgctccgagctgatacttccacttgcgagccgttcatccaactgttccttgagctgccttacttgtatagcaatgacctcatccaaattcccgttgttttcttccgtaatcgtcctcagcgatttgccgttgtacagttcttgatagagatccgcttctgaagcctgattcagagcgtcgagcagctcatcactgcttccctcacgagtgtccaagtcaacgatggaccatttagcagtaggtatgggagagatggcggattggccccatgctgttccagcgaaggacatagtgacaatcattgtgcctataataatgactcttttcatattcatatggataatcctcatttctgtagttgagtacgaactgaatcgtagcatgtcgtagatgtagttgttgatgtttcgatctgagaatagtgtaaacgggaaacctgaagtgaaacttaaaacaggataagtaatttcaaaccagcgggtaatgacggtaaaagtagatctatattttaattctcacttgacaggttgggttagttggttatatgataatctcaattattttaatactcattaaatgaacagtgaactaatttgaactgaaaactgcattgagctgattggaccaccaaaggctcccgggactactcctctaaggaatgtcctcgggggccttttttcgtatctttattgaagcttcaaacgatcagggaggttatgaaatgagtgatagagactgggaagcgttggagcggacggattggttatttcgcaaaatggtcagacgatttgtcaaagagcgggatcgcatctctgtagaaggtatcagcctgccaggcatgcttatcctgcacaaaatcattcgtgagggagaacagcggcttggagatctggcagaacagttggactttacatccggtgccattactgctctaaccgataagttggaaaaaaagggactcaccatccgcagacgaaaggaagacgatcgccggacggttttactggacatcacatccagcggtcgggagatgtatgcgagaaacagcaatataggtgcccgatgtatcacgcttctgtttgagggttttacgagtgaggaactggagcagcaaagtcaattctacgagcgggtagtagcgaatctggaggggttctcggatacggtgctggaattggcggagagcaacgggatacaagaacatgatcggccctccgcaagtgaccttgagcagaagcaacgggaaaataccgggaagaggaactatctcagttattgaggttgggtcaaagtaacgacatttgatataccacaaacattctaggggagagatgatcaatgggacactcaacaatatatccaactggagcgacgttatacaatccggataaggcttggggcggttataccgtttatcaggcaggtgaggaaggcgtagtattgatcgatatgaatggcaaggaggttcacctgtggaaaggattgttaggttttccggccaaaatattacctggcggctacgtgctgggcagcacgggtcggagagatccgaagttcggtattcaggataatgtcgatctggttcaggtggattgggacggcaacattgtatggaaatacaatagctacgaacacatcgaagatccggggtatgagccactatggtatgcccgccagcatcatgattatcagcgtgaggggaatccggtaggttattatgcacctggccttgcgccaaagacgaagagtggtaaaacccttattctggctcacaaaaatgtgagtaaccctcaaatttcagataagccattgcttgatgatgccattatcgaagtggattgggaagggaaggtactctgggagtggctgcctaacgaacattttgaagaattaggttttgatgaagctgctcgaaatgtcctgttccgtgatccgaatacacgttctttcggtcatctgggtggtggtgttggtgactggttacatattaattctgcttcttatgtcggacccaaccgtttctatgaggaaggagacgaacggttccaccccgacaatattatctgggatgccagagaggccaacattatcgccattacagacagacagagtggaaagatcgtgtggagattagggccagactatacttcacctgaagtgaaaaacatcggcacaattatcgggcagcatcatgcacatattattccccaaggtctaccgggtgaagggaatttgctcgtattcgacaatggcgggtgggcaggttacggccttccaaatccggcttctccatttggattgaaacatgcgattcgtgatcactcccgtgtactggagattaacccggtcaccctggagattgtctggcaatatacctcggcagaagcaggtttctcggttccgacggattcttataaattttatagcccatacatcagttccgcccagcgtttacctaacggcaacaccctaataaccgagggttccaatggcagattgtttgaagtcacagcggagcatgagctggtctgggagtatgtctccccgtacacagatgggcggaataccaatatggtctatcgctcatatcgagttccttatcagtgggttccgcagttggagaaaccgcaggaagttgccatcgaagtcattgatgtctccacctacagggtcccgggagcagcacccaaaggttctgcatccatcgtgagcgtagagataactcttccatttgtggagggtgcagcctgtgtggcaacgtcggatgaaggcaagtcaggcggttaagcgtcaagaatcatgactagatcgaatggggtgtatattgtgagaaaaccatccatagtaaccggcgtattgatattattcctggcaacggcactcctattatccggatgcagttcaaacgcagcaggatctggagcaaaagacgttaccggcaagaataccgataatgtaaaaattcgaattgcagatacaagtacgaacccaacgttcagggtagccattgccaaaggtttttttgaaaaccggggcatagatgcagagagtattacgtttggttcaccggctgaaggtgtaaatgcactatttatcaaacaggttgatattgcgtacggggcggacttccctgtattgaatgctctggctaaaggggaatattcagtcatcgcttctgcaggccagactacggatgaagcggcagccgcctggaagctgtatgcaagggatgatattcagagtggagcagatttgaaaggcaagaaagtgagtttcattcgaggcacatttattccatatctatgggatgaatatttgaaagatcagggggtggcgctgagtgatgtgacgcaaattggtcagggggcttttgatgaagcctacatcgcactgaaacagggagaccttgatgccgcttgggtcataggttccgcgttaaccgataaattcgatgcactcgaaggagtacatcagctgacggatatgtctcagacgcctatacgccttggtatgggactggtatcaagtaatgaattcatccaggcaaaccctgaaaagataagtgacttccttgctgcgctggatgaagcatccacgtatgcccaagcgcatcctgaagaggttgccgatctgatgtatcaagagaccaaacagcctaaagatgccacgttgaaagatcttccgatcaatccatgggaagttggatttacgcaggctgcttatgatagtttggcgggtcagaagcaatatatggtggacattggaatcatcgaacaggattttgatctcgacaccaaactcaatctggcttctctccagcaggcgttgccgaaaaaagtgacatatagtaaataattcttattgaaatgggaggtgtccgttatgtccttacctgcaactcagcataccattcatattgaacagcttcggaaaacgtatcatgccccgaccaatggggatgtacattatatcattaaggatgtcgatctggttatcaagggaggggagttctttgtcctgcttggtcccagtgggtgcgggaagtcaacgctgctgaacatgatcgcgggtttcatctccaagtcaggtggacagctcaaggtggacaacaaggagatcgacagaccgggcagggatcgggcaatggtattccagcaggcggattcttctctctttccatggctaactgtgagggaaaatgttgaattcggacttcgaatgtccaaggtccctaagacacaacgacgtgagatctctgatcgatacatccagcttgtgggactgagtgctcatgaggggaaatttccgaaagagctctcgggtggcatgaagcagcgggttcaattggctcgggtacttgcgaatgactcggcgatcttgctgatggatgagccattcggtgcgctggacgcaatgacgcggcggaccatgcagaaggaactggtgaatatttggaaagaaacacataaaaccgttatctttgtcacacacgatattcaggaggcgttattgcttggtgagcgcataggcattatgtctgtaggtccgtcttcgaatataacggatatttatcacaatacgttaccttaccctaggaacatcgcctcgtctgagttcaacaccctgtatgaccgaattcaaggccactttgaagaataactgaggtgatatgtaagatgaaatggttggagaaaaaatgggtgtctatcccgcttctatgggtaacggtcatcttaatttggcaacttggcgccctaatctatgggcctgacgtaatccctggtccgtggcacacgatcctgggagcacgagaactgatagctgacggtacgctgatggagtatatcggaatcagcttcactcgtgtactggcgggctgggtactcggaagcatcattgctattccggtagggctgattattggcaaggtgcatatcatccggctgttcgccgagccattccttaactttatacgttttatcccgcctatcgcctttattaccttattcctggtgtggtttggtattggagagcaatccaagatcgcactcattatgtacgcaaccttcttcatagttgtgttgaatacactgacaggtgtgctctccgtcgaagaggacaaaatccggtcggcccgcagtatgggagccaatgaacggcagattctgctgcatgtgattgttccggcgacaaccccgtatatcttcacgggtgtgcgactggcgatgggaacttcgtatatggccatcatcggtgctgagatgattgcctcgaatgagggagtgggttacttaatctggaattccagactctttttccgaacagattggatctttgtcggactgatttccctgggttttatgggattcctgacggatcgattgttcaactggtttggtcgcagagtactctaccgatatggggtcattggaggagcgaagcgggtctgaaacagaacctgggaacaccgaattccagacgttacttgaagagggagggtatcttgttttaacgtttgatcaaaaacctgttttggcacttctacacgaggccaaaacaggttttttgtgtgctggcgtaaggagtttcggcattgggatcaaaccgtggtataattgaatttcaaaaatacaataaacgtcatgcgggctgtacatacgctgcatgcaggagacattatggattggattattggcgccgtatgcgcttctatggtggcaggtgctgcctatgcgaaaaagtcgctaaccttgtctggctgcctggcagccatcatgatgggaacgatatattacggagcgggtaacctgttctggtttggcacgttattgttgtttttcattacttcaacgttgctctccaggtttcgtaaagatcggaagcaggagctggagaaatcctatgccaagtcaggaaatcgggatgccggacaagtgatggctaatggtggaatgggtatgttcctatgtctgggatactggatatttccacatccggcatgggtgtatgctttcattggtgtaatggctaccgttacatcggatacatgggcaaccgaaattgggagtctcagtcgcaagccgccgcgctctgttctcacgtggaaggtacttacgccaggtgcttcaggaggtgtctcacttcttggcaccgtggctgcagccgtaggcgggggtctgattggtgcgggagcattcttgttttcctggatcgccgggatagaagggcttagtctgtttagttggacttttgtcggtcttgcaggcgggttggcaggggcttttgccgattcctatctgggcgcaacggtgcagatgatgtatcgttgtactgtgtgtggccgtgaagttgaggtacatgaacattgcgggcatccaacggttcgggctcgtggctgggcatggatgagtaacgacctggtgaacgtgcttagctcggtgatcggcggatgtgtggcgattggtttaggtaacattttggcgttgtaagggggagtacatttgagcactgtacagggagacaaatcggaggctattttggatgcggcctatggtatttttggctcgaaaggtttttatgagaccaaaatgtctgatattgcagacgaagccggcatcgcaaaaggcaccatttatttatatttcaaaagcaaggaacaattatttatcgcagtatccaagcgggactgtaacagttttatcagccgtcttgaatatgctttgaactcgtatgagaacacaggtgataaacttggagcaatagccaagacccaccttacgtattattatgagcgccgcaatcataccaagctcttttttatggcacccaataatgatccggatctgatgaaattcatgaaggcatttatgaatcaatacatgagtatggtgtgtgaggtattggaaagtgcaagtgtacctgagcctgtattgctcgctgaagcctacattggaattctggaccggctgaagatggatatcatgttgaatccggagtttaatgaggaacatctgaacaaacgaattgcttttgcagcagcattgtttctggacggatgccgttcttttttacaagtttaaagtaagtgcgcggatgtacgtaatattgaattttaattcacagagaagtgggtacgagcaatgaacataatgacggtagagcaaattgcaaaaagttatggcgaaaaaatattgttcaaggatgcttcatttggtatggctgatcaggacaagattggtgtcgttggggtaaatggaaccggtaaatccacgtttttgcgtgtgatatctggtatggaacctgcagacgcgggacagatctcgatcggtaatgacgtacgtattcagttcctggcgcaaaatccggatatcaatccggataatacggtactgcaacaagtattcgaaggtgacagcatggaaatgaaaaccgtgcgcgaatatacggaaacgatggaattattggaactgaattcgtccgatccagcgttgcaagagcggttattacgtttgaatcagcaaatggagcagcttcagctctggcagatggagagtgaagcgaagagcattttgtccaaattgggtattcgtcaattcgatgcactgatgggcacattgtctggtggacaacgcaaaagggtagcacttgctgctgcactgattcatccttgtgaactgctcattctggatgagcctacgaaccatattgataatgattcggtcgtttggttggagcagtacttgcagaagcgccgcggcgcactgcttatgattacgcatgatcggtatttcctggatcgtgtggcgaatgtcatgctggaattggatcatggacgtttgttccgatacgaagcgaactatacacgtttcctggaactgaaggcggagcgcgaagaacgggaagcttcttcggaacagaagcgtaagaatttgcttcggacggagcttgcatggattcgtcgtggtgccaaggctcggacgacgaaacaaaaagcgagaattgatcgcttcgaacaactcaaagaccaacaaggagtccagcgctcgggttcattggaagtatccgttggctccactcgtttgggtaaaaagattctggagatcgagcatctttccaaatccgtgggtggccgcacgctgatcgaagatctgagttatattgccgtacctggagatcgggtagggattgtcggaccgaacggtagtggtaagtccacgttacttcagatgatatctggcaagctggaacctgatgcaggtgtggttgacgttggtcctacggtcaatctgggttatttcacacaggaacatcaggagatggacgaatctcttcgtgtgattgagtacatcaaggaagtggccgagaatgtgaaaacagctgatggctctctgattacagcatcccagatgctggagcggttcctgtttactccggcatcccagtggacgccaatctcccgtctttctggtggagagaagcgtcgtctgtatctgctgcgtgtgctgatggctgctccgaatgtattgctgctggatgagccgacgaatgatctggacatccagacactcgctgtactggaagactacctggatgattttccgggtgttgtctttgtcgtatcccatgatcgctatttccttgatcgtactgtggataaagtgctgtcttttgagggcaacggtgctgtacgtgtacacgtcggcgactacagtgagtatgcggaatggatgctgaaaaatgcacctggagttactcaggaaagtgatacaggagcggcgaaggtgaagcagtcatcagataaaacgacgcctgcagtgtcagcggctaaaccgaagttgaaattcagcttcaaggagcaacgtgaatacgaccagattgatgaaaatattgagaaggctgaagccaatcttgtccggattaacaaagagatggaagagtcatttagtgattctgcccgtctgcaggagttgatggcagagcaagctgaggctgaacgtcatctggatgaattgatggaacgctggaccgttctgaatgaacttgcagagcagattgaacagagcaagtcttgatttataactaaacatcgccctttcttctacagtgactttatgtcgcattggagaaaagggcgatttttttgtctgcgaatttgcgattttatgtgaaacgttctgtatgttcattacgttgtataagtaaagaattccatagaagggagagaacaccacacttatgtataaagaaattaatcaacagttggcagcgctcaaggaaaaggggagaatttacgagaaatggaccaaacgtctggagaagcttcaaacggaggaaagcgaatgggaagcaaaggtaaaacgtcgtctggagcatctccagaaggagcagaaggacgttgatcgactgaacagtatgacattgtcggcatttttctatcaactgattggcaagaagacagagcgtctggagaaggaagagctggaactcatggagagcaaggctgcatacgacaccgcttgtcgcatgttacaagacgtacaggagcaacgaattcatgtagagcaggagttggagggccaacggcagtatcagtactggcagagcgattacaacgcgctgtgggggaagaaggaaggtcgactgctggaccaggatgcggaattgcaacagatggctgagaatcgggaacatctggcgagcgagcttcaggaactggatgaagctttccgggagggggaatacctgctctatgcccttgaacgtgccgagaaggctttggcttcggcaggtaattggggtgtatatgacatgatgggtggtggggtcatctccacacatatcaagcgaggaagaatggatgacgctcaggtcgccatcatggatgcaggtaagcgtctacgacgttttcagaaggaactggaggatgtagagatggcagtacatgcggatctgcatctggggggtctgctttcattcgcagactatttcttcgataacctcttcgtggactggatggttcaagacaaaattcgtaaagccgaacgtcaggtgaaggatggactgagcgcggttcggaaaaccatgcatgtgttaagaaatgaaatgcgtgaccataaggcagagttagagatattggatcgtaagtatcatgcatatgtcgaacaggcagattaagagatatgacaacaaaggccccttccaagcacaccgaattgtgtgcttggaaggggccttctgcttagacgaacatgtggatattattcatgacaatttcgtcgatcaatgattctgttttacttggttgtaatgtaggctgcgagcaatcgtgccgtattcaggacagcatccttatgtgtacgctccatggaatgagatgcgtgaactccaggaccgatcagtgctgctcggatattatttcctccgcgtaatgctgcactgccatctgagccatagtggggataaatgtcgacgacgtaatccattccatcttgtttggccagttcaatgagacggctggtcatatcgtagtcatacgggccagaagaatctttggcacatatagaaacgtcggtttctttacagctcaggtcatcacccatagctcccatgtctacagcgatcatttcactgatttccgcagggatatacgatgcgccatgtccaacttcttcatagttcgagataagcagagagacgttatgtaatggtttccagccttcgcgatgtgcagactcaaggatgccaaagagggcagccacgctggctttgtcgtccagatgacgtgatttgatataaccactcggcgtgatgactgcgcgagcatcaaaggagataaagtcgccgacagagatcccgagtttcaacacatcttccttggaggaaatgacctcatcgattcgaacttccatatggctctcggaccgttcaaaggtacgtgcatccggataaacgtggacagatggatgaagggagagaatggtgcctgtgtatgtctttccatcccgagtatggatgctgcaatattcgttttcaatactttgcatcgaaaagccaccgacagaggtaagcttcaatgtgccatatgatgtaaccgagcgtaccatggcccctagcgtatccacgtgagcgcttaaagcaattgtcttggaagagtcctgtccgggcaatgtaagcaccgcaccgcccttgttattcagctcacaggcgatgcccagtgctgttgcttccttccggatcatctcgataatatgatgtgtgtaaccacttgggcttggtgtgtccagcaatgttttcagaaaagacagaacgtatgattcatcaattgtaaaactcattgtgtaatttcctcctcggatcatgggtatggtgtgaaacaaaatacagcctgtctgggggagagaatgtgatactaccattcctgactcgccagcaggctgtctctgattggttacagtgttcccgtagggtttcctttgcgctgactctggatcgaatcattctccaataggctgtcggattcatttgagtcaagcgaatccatcgatttgaaagaatccaacgtagatttgcttgtcgcagaactttccaattcagatacacgcaatttcaattgtttattctcacgttgcagtctgtattggcgatagatgccatatgaccctacaataattccaccgatcagggtacagccgagaatcagcaagatcagcgggatttgtaccgtgttaaataacaggttgacttgtacggaatccacattaataaccgcaaagattcccgtgagcagtgcaaaaacaagacctgctatgagtgcccattgcattttcatggtgttgcctccttgttgaacaattgagaactagatatgcattacccatattcgggtatgttgcatcttgcaatgatgataaaatcccctgcccaaacgggcaagggatgcaggtcacatggaaagacaaccttatttggttagttgctccatctgttcaatcagttccttgaagacactcatagcttcacgaattggctgtggtgtagacatatccacacctgcttttttcagaatgttgatggagtaatcactgccaccactcttcaggaagccaagataacggtcaacagccggttggccttcttccaggatttgcttggaaaagcttgttgctgcggagaagcctgtagcatatttgtaaacgtaaaagctgttatagaagtggggaatacgagcccattccatttcaatttctttgtcaacagccatgccttctccgtgatatttaacgttcagatcataatagatctcggataacaattgtggtgttaatgcgtcaccttgttccgcacgttcatgaatgattttctcgaattcagcaaacatggtctgacggaataccgttgtacggaattggtcggcataataggtcaacagatacaatttttcctttggatctgttgatttgttaagcagataatccatcagcaacgcttcgttggttgtggatgcaacctcagccaagaagatggtgtactgtgcatcacgatacggaagtgttgtatcagagtaatgtgaatgcagagcgtgacccatttcatgtgcgagtgtgaacatgctgttcaggttatctttgtgattcaacaagacatacgggtgagtgccgtaagcgccccaggcatatgcgcctgaacgtttattttcattctcatatatatcgatccaacggttatcatatccagtctgcaatgcgtcagcatagtccttgccgagtggtttcagaccgtctttaaccgtttgtttcgcttcctcataggtaatatccattttgtattcgtctacgagtggagcgaacagatcgtacatgtgcaattgatccacaccaagcaactttttgcgcaggtccatataacgatgcaataacggaaggctctcgtgaatggtgtctaccagattggtatacacatccgttgggatgttatctccatatagggacatttccatcacggaagggtacttccgaacattagcatagaacatatttttggttacatttgcattcaaggcagccgcaattgtgttcttctgtttggcataggtttcgtataccgctttgaaggcacgttcgcgaacttcacggttagggttctccaggaactgaatgtagctgccgtgtgtcagctcaacttcgttaccatgttcatccttgattcttgggaacttgagatcggcgttattcagcatgctgaagattgtctgtggtgcttgtgaaaggttgcctacctgtgcaagcaaagcctcttctgcttggctaagaacgtgggctttttcgcgtttcatctcttccagcgtaaatgtataagcagaaagtttttcgttcgcaataaatgcgtccaactgatcatccggcagggaaagaatctccggtgtgacaaaagaaagtgcttcaccaacccgtacgcctaatttctgggctttttgggacaggttttgatatgtaggattcgctgtgtcttcatcttgatgcatacgtgcgtacacaaagaggcgttctattttgaggctgatctcatcttcgaattcgaagcaagatttgagtacatcgggttgattcagtttgccttggaattcggaggccttcttggtcaaagacgatacttcttcatattcttgatcccaggctttctgatcggcaaataaatcttccagtttccagctatgttcagccggcacctcggaacgtttcaataattgactcatggaaatcctcctttgatgatctgatgaatgtatggacgaagctgccttcgtctcgcttgcctgtgcggagagagacgaaggaatcagactaagtaccaggataacagatagcgatttctggtatttcaacggccttcctccttacgatacgaataatctcgtatagtatgaccttaggcacgttgaaatatttgagcatctggggtccccgtgattaggctcccatgttatacagaaaataaacgatcaggaaaaaggcgaaacaaatgagcagggtagcaataagcgccattccccgtcttaatcgatccgggatggaattgcgtcccagaataagcacaataccaagagagaaggcaaggataataaagatgacgacattgcttgagtcaagctgcatgggttagacccctttgaaggcagccatcaattgacgccattcatcctcacggttctcaaaatctgcttttggaaaacggcgttcagcccagtgcattaatgcaggacggctaaggaatgtatggcattcttcgccccactcttccgaaatttctcgcagtacgagatatttgccttgaacttctacggtcatcatattccacttgtctgttttgtatatttcatgtttttttatcataggtagtctccaaactaacggttttggtaaaatgataccgtaccctacgattcaaagcaaattttttcgacatttatggaaagataaattgcaaaatggaagcccatacagtataataagggtattcgccatagatggcgatatttttaggaggtttttcatttgaaaggtacagttaaatggtttaacgcagaaaaaggctatggctttatttcagttgaaggcggcgaggacgtattcgtacatttctccgcaatccaaggagatggcttcaaaacattggaagaaggtcaagcggtagaattcgaaatcactgatggaaaccgtggtcctcaagcagctaacgtaaacaaactgtaagaatttatccggctaacggacttcttatatattataaatttatagctgaatattaagaacctaagcacagtcccccatgggaggctgtgctttttttgattctaaaattttcagtgtatataacggttgaatacgatgtaagtttccctgtgtgttcacgagacacgattggtcatgctggaccataacttcaatccgaaaccgattagtgcagccagggagaaagccatagcggtgagatagaaggtttgtctgcctgcatgttccagcagcagtccgcccaacgttccactaagaagtcccgaagcactggaccagacaatggtgaacaaagccatacccgtagctctgtatccgtccggaactaggcgaatgatgtagcggaccgccgtaacgtagaaaataccaaaggtaacactgtgcatcgtctgaattgcaacaacggctgcaggtgtatcggatatggacatgagaagcaaacgaaccgtatacatcagtgcagcaaaagcaattagcggcagttctttataacggtttccatacttgctgagcagtagaaatatggggatttcacttacggaagagatcagcaaagaccagccgatcagcccctcactggcacccagatcttttagcgtaatggtaaggaatgcttcgttcatgcgatgtcccatggcaagcaaaaatacacagccaaaaaaggtgagcacatctctgcgtttcaaaatagcccataaccccgatagatccattttgctactgcttcccgaaggttgatccttcaattgaaaactgatcaatagtgtagttgcagcaagaccaacgcagacccaaatcgtccatgctggaccaaaagatccaaggaaatacccgatacttaatgcaaagaaggcataaccgatcgatccgaagactcgaatggaagtgaaatttcggccgtacttgctggccgttgtaatagccatcgtatcggagagtggatagaccggataatagaaaaagtaaaacagggtcacgagtacaaatacctgaccgaaagttgttgcattggcgagcatgatccctgtaatcaattgaccaccaagcagaatgatcatcactttgcgtaccgtttggtagcggtcgctggccatgctccagaacatattggagaacacagagatgagggggccaattccgtagagatatccaatctcagcccgactgaagcccagatgactgaagtaaagctggaagtaggataccaccaggacggtggaaccaaagatggtgaacatgagagcccgcagccagttctgatccgggcgggcgttgtgacttaatttcatgatgagagactccaatcctgataacaattcaatgattttattaccctttcagggatgttgatttacggtctttgggcacggacatcgtaggttcttgcttcgtgcgccggatgacaagccagacaatgatgagttcggcgagcaggccaagggattgggcaacagcgccaatcatgccgttccacgcaggaaaaatactaaccagtataagcagcacaattaccgtgcagattgcattcgccgtttgtgaacgaaacatcgtttttgtctgaccgcgaagcagaatgaggccattgctgaaatccagaaaagggaagatcagcggaaataagacgaacgcacgcagtgtccacagactttgttgcaaaagttcgccctgaacgctcatgacattttcgagtacccatggtcccaagggggtataggcaattgacaccatcatcgcaaacggaataaatccggtgacaagtgcgaattttcgtaccagtttggcgtccacaaggtagaaattcagcacgatctgatggatgtatgtaaagaagcttagcatcaactgcatcagactgcttgctatggcaaaggatgaaatggctagtgcgatcccggtcgttttgccaagtacgatgttaataaccggtcctatgaacagcgctacaaagctggataacagcagtggcttataaaagcgaaatacgtctcccttgctctcgacgggatgatcctcaagcttggctggcatcttgcgcttgatgctgtttccctccagaaagctgacgagcgcttcaatcatcatgccagtagcaaaaatgatagcgcctacacgtccactgtcaatgctgtctgtgtatatgaaatagagggataggccgtacattccggctaaacggaataccatcccgatggttaaccacttggtgcggttattcgtaatgatgatcccctgatagatgttgcggatcactgaaaagatacttacatacatgagaatttcatatacgtcgatgactttgttcagcagatccggacttacaccaaacaagtatttgaacaccccggtaccaacgggagagtatacgataagaaacccaatgagaagcacacaggcaagaaatattttggtcacaaacgtgagggcctgaaaggaaaggcgatcgcgaaccagtgcggaacaggtttgccgcagcagggtggaggggcgttccgtgagggttaacaagctaccggcgatggcatagctggcaataaccgtctcgggatgagcggaacgtgctaatgtgctgtttatgatgacgtgagaaatggtgacgagagaggcggaaatgccaagtggcacaaaaaaagaaaataaccgtctccacgaaagtgattcacttgacgacatgtcaacgactcctttgatggatgaaatatgcctagtatatcacaaagctttgggcgcggatgcgattttttatgcggaatatgcggcagatcatttgtacaattaaggggatcatattataataggaatggttaaaaatcgctctaatacgtattcaaccaagtggaggcacatttattttgagccaatcaaatcgaaaacgtcatcaatatccgcgtggaccgttggcattgatgagaggggtgtacaaatacaccattccggaaacacggaaggcactgaatggatggcgtgctcaagctgaggcgattccgaatgaggagttgcgtacacaggcacttgccagtctgaaggataaacagtttcactgtgaaggcggaaccgtctacgcattggctgatttgcccaacagacacattctgattccgctgatcgtttcatatcaaactattagtgattatttggacaatctgtgcgaccgcagcacgtcgatggacccggatgactttcgtcttctccatcaatccatgcttgatgcggtagatcccgaagcaattcccgtcaattattatgccctccgtgaggagcaggatgacggtggatatctgcggaatctggtgaccacatgtcaggaactgacccgtcagttaccaggctatacgtccgccaagccccaaattcaggatctggcaggcctatacacggacctgcaggtatataagcatatcaagccggaactgagagaaacggcactgctcgaatggtggtcggagcatcgtcatcgcacacctcagtttcgttggaacgaatttgctgctgcaactggctctacactgggcgttttcatgctgtttctggctgcgagtgacgatcagttgactgaagagcaagcggcctcgatccacacggcctatttcccacatgtatgcgcattgcacattatgctcgattatttaattgatcaggatgaggaccgcatcgggggagatctcaacttctgcaactattatgagaatgtagagacaatgctggaccgaattgcttttattgtggagatggcacgcagcgatgtgcagaagattccgggtagctcctttcaccggatgatcatcgaaggactgattgccatttacctgtctgatcccaaagtcagcgaacaacaggaagttcgcgttgtatccaaacgtctgctgaaaaatagtccgatcacaagaatatttttcttcattttcagtcgctggatacggaaaaatatgtaagtcaggtgtgatattgcggagcctgaagtgaaactagaggaggaagaaacatcatgacagcagtaaagaaaatcgcagtattaacgagcggtggtgattcacaggggatgaacgcggctgttcgtgcggttgttcgcagcggactgtttcacggtctcgaagtatttggagttcaacgtggataccagggtcttttgaataatgacattttcccaatggatttgcggagtgtaggggatatcatccaacgtgggggaacggttcttcaatcggcacgttgcaaggagttctataccgctgaaggtcagcaaaaaggtgcggacattctgcgtgcgcgtggcattgacggtctggttgttatcggtggggatggttcctacaacggggcaaataaactgagcaagctgggcattaacaccatgggtctgccaggaacgattgataacgatgtttcattcaccgactataccatcggatttgatacagctgtaagcatagtagttgatgcagtaaacaaattacgtgatacgatgtcttcacacgaacgttcttccatcgttgaagttatgggtcgtcactgtggggatatcgctctgcatgccggacttgcttcgggtgctgaaacgattcttgtcccagaagttccatttgatatggacgaagtagcagatcggatgaaagctaactttgcacatggcaaacgtcacagtattatcatcgttgcagaaggcgtaggcaaaggtgaggatgtagcaaaagaactgatggaacgttgcccaacgtatgagccacgtgtaaccgttctaggtcacattcagcgtgggggtacgccaacacctttcgaccgtaacctggcaagccgtcttggcgacttcgctgttcgcagtctgattgcaggcgagacagacaaaggttgtggcattatcaagggtgaacttaccctgacagatattgataaagtggttaacacaaaaaaagatttcgatatggtgacttacgagcttgcacaacgtttgtcccaataattcgattcatacgcaaagagcacaatcccgttttaacgtggattgtgctctttttgttgtttcacggagtgagtatatcaatgttacgccttgcggagtgcggcttgtttttgtaccaggaagagtctccagagaagcgctgttgctcctacagcaaggccggcaatgagtccaatccagtatccgaaggcaccgagtgaagtatacgtagcagttagataacctacaggcaagccaatgatccaatacgctatgaacgtaatgattagtgccggattaacatctttgtagccacgcaatgctccttgggtcggtgtagcaatcgcatctgagatctgaaagaaaatggcgtagatgaggaaatgctgcgtaagtgcaatgacctctcgatcgtttgaatacacgcctgcaatctgttcgccgaacacaatcaacacgatcgctgtcagcagtgagagcacgatggctccaccaattccaagcagactgtattgtctggcatctctcagacgccccgcacctgcctcatagcccacaaggatcgtaagagccatacatatgctcacaggcagcatgtagagcgtagaagcgaaattcagcgccgcctggtgtgcagcaattgttgtggtatcgaaacggctcatcattaaagtcacagcagcgaagatggacgtttcgaaaaaagtcgcaaatccgatgggcactccaatcttgagtaactctttccatttggagaatgagacacgggtccattgacggaaaatgccatactgggcgaaaggttcgacccgatggacaaaaaagagactaataagaaagatcagccagtatgtacatgctgtagcaacaccagcaccaacaccgcccaattgtggaaagccccagcggccgaatatcagcagataatttagaaagatgttaacgggcagggaaaccaacgtaatgaacatcgtagtccgtgtctggccaagtgcatccatgaagctgcgcagcactgtatatccgaagagcggaataatgccaaaagcgagtgcgcacaaaaaatagaaggcgacttgggcaaccctgggctccagaggcattccgttcagtatagggccaagtaacaacgccccggctccgataacgacgagactgactgcaatcccgagatacagcgcctggatgacgttatacccgatctgatcattacgcttggaacctaacagatgggaaacgacaggtgtaataccgatcagaatcccgcttagtccagtttgaactggcatccacagacttgtgccgattgcaactcctgcaaggtcggccggagaaaacttgcctgacatattcgtgtcgaagaacgacatggcagagagggcgatttgagtggtgaagatgggcaaaaatataatcaggaattgcttcactttttgggaaaaacttgttgtgttcatgttcactggcagtgcctcgctattctgaagagatgtcatccaagtgtcatatctggacagctatttattgtagtggattttgatcaatttgaatagggacagaaagcagagtaggggtgtacagagataaatgaacaccaaaaaacctcgctccgcttcaagcagaacgaggttggatgaaatgagaagtatgaaagagtgcggattacttatattgtacacctgatgtataacggttggacgcattccagagcagatattcatgcacatccatgtctttcatcgctctaatctggtcttccacttgtttcttgccatacttgatataatgcccactgcccagccagcttgctgtgaagtcctgaatccacggacgaatgacgggtttgagttctttggtagggtctagtttcttgtgtgtatcttccattgaacccttgatggttgtgtaaggatctttgtcagggtccttgaccccataccagccagtagaatagtgactagggtataccatcggtgagatgacgtccacgttttcggatatcttaacaaaatcctgtccaatgccctcagccgcaggtacagaagcggcataaccaaaaatatcaaccgagacacgaacacctagcggggccaactccttgcgtgcatattgcacgaattcagccacaacatccacgcgtgacttgtcagatttggtatatttcagtacatcggctcgagtttcgaaaccttccgggaaacgaacgtagtcaaattgaatctctttaaatccaagcttggctgcttcctttgcaatctcaatgttatagtcccatacttccttgctgtacggattcacaaagctgtcgcctttgccatttgcccatacagatccatccttgttacggaaggagagctccggatttttcttggcaagaatcgtatctttgaatacaacgacacgtgcaatcgggtagacctcatgtttttgcaatcgtttcatcaaggcatcgatatcccgaataaaaggttgggatttacccattttctgaagcgctttgttttctgtgggataagttatgtatccgagatcgtctttgatatcaatgaccatggcattcagttctgtactgtctgtcagttccaacaattctttcatacgtgcgccgcctgcgctgtaggccgttacataaatacctttgaccacaggtgcatcaggttgaggatcaattttggcaggtgggttatcggcatcaataacaacctgatctttttgagattggataattgcggtgttaaaactgttggttaacgattggaattgaggatttccctggtccgccactgcgggggcaccaccaaagcttccaaaggccatagccattaaagcccaaaacatgttcattcatttccactcccttatgtgtgcattccatgtatgaattatacattaaagcctctgggcttttaaccatattaatcaagtaatgaaacacatggaaaaaatgaaaaccgcttcctgctgaggaaatcccctgcaagaagcggcgtgatcaatctgaaaaaaattattgaatgtaaatctcattttgatgctcacaaatactgtactgaatgatttccattgcgtctccctgttccaggatgcccagcccatcccggaggacaatcagtgagtcgagttcattcggtttcaagaaagggagcatttccgggcaccatctgttgacaatctcaaacagttttaccgtttccatatccacaataatcaccctttcctactcgaattccaaaatggtaagtcattcggcgcgattcgggaaagcatatggcctgtgaaattgaagggttgaacctgctatacaacatatttaggagccgtacaccgttattataccacaatgttgtgaattgttaaccgtacaggtgtctcaacttctgcgaaatgaacccataacaccaaccgtttccacaatgttaacaaaagcgtttggatctgtatccttgataatacgtttaatttcaaccaactcgtagcgggtggtaacggtcatgagcatgtccttctcaatatccgtgtatgctccctgagtcttaattttggtaactccacgaggccgaacaagtaatttttttaacatggcttcggtttcgtttgtaataatgtacagtgttactttgacgtgactgatatggatcagatcaagcactttgcctgtaatgtagatggataccatcgaggccaaggctgtattccaattgtcactcaggtatcctgcaagcataatgatcgtaccgttcataccggccatcactgtaccaatcggaaagtctcgtttacgcgtgaaaatggacccaacaatgtcgagtcctcctgtggagccgccgactcggaaggaaacgccagtacccattccaataagcacaccgccaaatacagaactaagtaaagggtctgtagccacagcaaaaacaggcagaagcgcaatgaaccaggaagtggctgctaccgaaagaatacttaatgtaatgaagcgtcgtccaagaataaaccaacctgcaatgagcaggggaatgttaagaacaaaatacattatactaagattcaacgttgtaaaataacccagaagcattgaaataccggacaccccgccgcttaaaagctgatgggggaccaaaaaccagttgaagccgcaggcaatagctgcagcacccaaaatgatcactaaagagtgccaaattattttgggcaatttaatcacctcatttatatttaaaaccagattgctggtaatcttgaattgttttgtgatataataatttgtggatattcttgagtaggaaacttttcctaaatggagcaataaaattttgaaatgtttcaaacacatgtatgtagttttagtcttatgttggggacccattcatggaattatattcgttagtgaaaataattcgtcccgttgggataccctataaatattaacgctacttaagaatacagacaacaaagtggattgtccaccatgtccaccatataaaaggagcatgaataattttgacaaatttaaactttacagatttcaatcttgaaccactggtgctgcaagccatcactgagctcgggtttgaagaagcaacaccgatccaatccaaagcgattcctttggcactcgaaggcagagatttgattggtcaagctcaaacaggtacgggtaaaacagctgcattcggtattccgttgatcagcaaaatctcaaaaagtgacgagaaaatccgcgcccttattatggcacctacacgtgaacttgcaattcaagttgctgaagagatcgaaaaactcactcgcttcaaaggtcttcgctccctgccaatctacggcggacaagatatcgtgcgtcaaatccgtgcactgaaaagaaaaccacagatcatcattggtacacctggacgtctccttgaccacatcaaccgcaaaacaatcaaactagatgatgtacaaactgttgtactggatgaagcagatgaaatgctcgacatgggtttcatggaggatatccaatccatcctgaaacaagttccagacgagcgccaaactatgctgttctcagcaacaatgcctcctaacattcaaaaattggcacaacaattcttgaacaatcctgaacacatttctgtgattccgaaacatgttagtgcaccattgattgaccaatcctatatcgaagtacctgagcgtcaaaaattcgaagcattgagccgtttgttggatatggaatctcctgaactggcgatcgtattcggacgtacaaaacgtcgtgttgacgaattggctgaagctttgcaaaaacgtggatattctgcagacggtcttcatggtgacttgtcccagaatcaacgtgatgcggtaatgcgtaagttccgtgacggcagcattgacgtactcgttgcaacagacgtggctgcacgtggtctcgacgtatctggtgtaactcacgttgttaactttgaccttccgcaagatccggagagctatgttcaccgtatcggtcgtacaggtcgtgcgggtaaagagggtgctgcttggtccttcgttacaccgcgtgagattgatcacttgcacttcatcgagcgtgtaacacgtcaccgtattccacgtaaaccactgccaacaatggcagaagcggttgaaggtaaacaacgtttgacggcagagcgcttgctggaaatcgtacaatcaggcgaactgaacgaatacaaaggtattgcgattcaaatgcttgagcaatatgattctgttcaactgttgtcggctgcactgaagctcctgacaggtgacaagaaagatgctcaagttgatctgactcctgaagatccaatccgtgcaaaacgtcgtaaaccggatgttcgctctggcggacgtaaaccatcgggttacagcggtaaccgcacaagtggtagcggcggcagtggtggtggttacaaccgcgatcgcaacagcagtggcggcggacgtggcggttacaaccgtgatcgtaacagcggcagcagcactggcactggcggtggaagcagagaaggtggttacaaccgtgaccgcaaaccgcgtccaagcagtaacgaaggacgtcgtccagcgaaagattcttctttcgagtaatataaacgtatgatctgaaaaatggagcgggcaactgctccatttttttattttcaaagtgactgcatcattttattttactatcataagcggccagaagcgctagctaaggataatgacgatctcttttcgggaagtactggcttttcctatctataataaggtatattaatattagacttcaggtaattcgcaaggctgcagaggaggagaaatgtttggaatttaaaggagctatgggtgggatctaccggcttacagagtggattacgagactggccgcaaccaatctgttgtgggctatttgttcgtctccgttcttgtttttcttgattatgaaactgctcgtgatgcagcagaacctcgcaaacgaatcattgcaaatgaactgggctatagctattgtggcaccgcttacactgttcccggcgacttcggcgctgtttacggttgttcgtaaatggaatatgggcgatacggatgtaccgatcttccgtactttctttgtaggttacaaggaaaactacaagcaaagtttaattgggggtattttttacacactgctgttcgcaattatgtatctggattatacagtgtacatgacgcagttccgcaatatgcagctcgtgggaatcatcatgttagtactgcttctcttgttatttgtatcactctttaactttttctcgatggttgtacattatcatatgtccatcggactcattatcaaaaacgcggtattgcttacgctgatcagaccattccgtgtattttccacattgctgggaagtggattgctgttctacatcggtttccgttatccggtcttgtttgttttcttcattatcagcatcattgcctggtttgctttctttaacttctacgcaaccttcaacaagatgcaggagcagatggagaagatgcaactcaagaaggaagaagaggaagctgctgcgctggctgaacaatcagcagagaatggtgaaacatctgagccatcagacgacaaaaacattacattgcaaaaataaaacatgatgaatcgccatttactttttacacagttagggatataataattgtacatcctgcgatgtacgtttcggttattcgttgttttgaaccaatgatgatgtcttcgggagatcaacacagaatgttgctgaaaagccctgtctatacgacatggggacttcaaaaagcatttttgcggtcacccacctgccaagcaggttcataagacaatgtagccggacggcataggcgggttcctaaatcttcatgtacagcaccctgacttttcctctacaaaaggaatttcagggtgtttttaagttgtgatgaatgtttttgattggttttatgataaatatgatgcttgcccttttgttactacttgaacaatgttacactaagatacataaatggaacggttacaatcaaaggaggaagggtcttgaccttaaagagaacgctcgtcggtatcatccgcagcatggaggggaccagcgatcgagccaaggatcccaaattaaaaacacggtattataacttatccaaagacagagcctgggaagaggtctcttcgacactcaaaaagattccgggttataaagtgctgcatgaagtgccttctgttggagaagttattctggagaagcggactacctttggacggacgatggatattacagtttccattatctcagtaagtcctgttcgcagtgcggtggacatgtattcagcttcacgtggttcacttggagacttgggttccaattatcgcacgattatgaacttattctctgtactggataaaaagctaagcaagtataaagcaaatgattgaaatagatgataaataacaaaaagcgagtgaaggttaaccttcctcgcttttgttctgaacgtatgataacttctacagcaaagcttttacagcagcaatcgcttgttcgaagttaggggagtctgtcatttcaggcaaatactccacatatgtaatccggtcttcggcatccaaaacaaaaatggagcgcatgtcgagttggaattctttgatcagaacgccgtagtcttcaccgaaagaacgtgttttgtagtctgacaatgtaactacgcggtcaacaccagctgctccacaccaacgagcctgagcaaacggaaggtcaacgcttactgtcaagacaacaacattgtctccgagttctccagcttccacgttgaaacgacgagtttgcgcatcgcatacgccagtatccagggaaggaacaacgctgattaatttgattttgcctgcgaagtctttcagggaagcgtcctcaaccaggttcttgctcagtgtaaaatcaggtgcttgatcccccactttcagttcgggtccgatcaatgtaatagggttgcctttaaatgtggctgcgcctgtacgttcttgtgtcataataatgttcctccttataaattggtgatccgtgccaaaatccattataatcttttatgaaaggcattgtccaattcggacatgtaccattacgatggatcagagatgtgagtccgatctgaacagggtggagtgaaagaagaaatttatgatatttattcgctatgagaactggaaaggttatttgaagtatttccctttgacgtcgctttttttaattgccaatgtagtcatgtttattgtgttaacggtgaacggtggatcaacgaacaatatggtgctgctgaaattcggggcacttacgaatcatgaactgttcgcacatgaatggtggcgttacattacatcgatgttcctgcatgcgggcttcagtcatttattgtttaacagttttgcgttaatcgtatttgctccaccgatggagcgtttgctcgggtcggtaaggtatggtgtattgtacctgggtggcggtgtattgggtaatattcttgctgttgcgtggtacaactcggttgggagtattaccatctcggtaggtgcttcaggagcgatctatgccgtctacggtgcattcctgtatgtagcgctgttccagcggacgatgatggacgaggcttcgcgcaaaacgatgtacacattgcttttgttcggaatcatattctccttcgccatgtcaggcatcaactggatggctcaccttggcggattgttgggtggattctttatttacggactgttgatcagattgtggaaaccccgcagcttaaagcggtagtcagaacgttctcaagatggaatacagtcaaggataagtagggtataacagattggagcgatcaggcgagtggaattaagacagttgcattactttttaaaagtggcacagaaggaacatgtaacacaggctgctgaagagttgcatgtggcacagtcggcggtgagtcgtcagattcatcagctggaagaagaactgggcgtggacctttttatgcaaaagggacgaaacctgcagttgactgcagtggggcagcttttttgcaaacgaattgaaggtatattaaaagatttggacaaggcagttggggaagttcatgagtttctggacccggagcatggagagattcgaattgggtttccgcatagcctggggattcatctcattccttccgtggtggctgctttccgtcagcgctaccccaacgtgaaattcagattcaagcaggggatgttccctacgctgattcgtgatgtgttatccggagaggtagacttggcattcatttctccttttccagagaagcatgatcaagtagatggcgatattgtactcacggaagaattacatgcgatccttcctcctaatcacccgttagctggtgaagagacaattgcgcttgaacagctcaaagatgataaatttgtattgtttagcaaaggttattctcttcgtcctattgtgtggcatgcctgtctggaagctggttttacacccaagatcgcttttgaaggggaagagaccgacaccatccgcggattggtcgctgcgggcatgggggtcagtctgctgcctgagatggcgttattccagacgaatccgttgcaaccggcacatgtggctatctcccatcccaaagtaacgcgaactatcgggttaattcatcgtgcgcatgataaattgccgctggttgctcagtcctttcgttcattcttgcttgattatttcggtttacaacaaaacaataccccatccgattaacggtggggtattgttttttgtttttgttgtattaagtatccaattaatcacggctgttgaagattccgatgtaacgaatcaactcaagcaatgagatcaacgctgcagcaacgtaagtcaaagctgcggcattcagaacttttgcaacacctttttcttcttcattacggatgtacccttcggataccataatctctctagcgcgattacttgcattgaactcaaccggtaaagtgatgagttggaatgctacagttacggagaagaagatgataccgatacctacaaggttcatggcattgaagatgaatcctgcaattaacaggaatggagctaatccggatgcaaagttcacaattgggaagatccggtgacgcagtgccagcatcggataactttctttatgctgaatggcgtggccaacttcgtgacacgctaccgaaacagctgagattgagttttcgtaatatactggttctgataaacgtacaacccgattgatcggatcatagtgatcagagagtgtaccgcgtacaggttcaattggaacatcatgcaggccgttagcatcaagcatctggcgagcggcatcgtaaccagtcattccgttctggttcggtacctccgaccaacgtctaaacgtacctttaacgcgaaattgcgcccataaagagagcaaaaaggcgataatgatcaatacgaacataccgttattaaaactcatattcattcctccgctttctatgaataagctacatcatggtgttctcaagcaagatttttagtgcctccattgtaccggcacttttggtgaggagtcctgccatcattttacgtgcttgtacaggtttcatctctccaagtagcggtttgagttcgttaacctctcgctcaagttgttgtacgtgaagttccaatgttgtcaatttgctggcaacttgttcttctgtactaaccagacgccacttctcaagagattgtttaatctcgtcgagactatacttctcttgtttcatctgtacaatacgttcaagcctcgttaaagtttcattactatagagacgataatttttttgtgtacgttcttcgggagcgattagtccaagctttgtgtaataatcaatcgtccgttcactaacaccagcggtcttggcaagttcgccaatccgaaaaagtttcatatccccaatgatattcacctcgcttgcaagttcaaatgtagggaattgtagtttccacttgtgaatttctagactacgcccaattttcttactaataagtatgatacatgatctttaaccgtacagtcaaacgttatgctttgacaatcagcatgctgcatttctatatctatgtactcatagaatgtgattatgtacttaagtgcaagaaaaagacgtatgactttattcccagaaataattttcagttttgatgaaaatactcttgtcaactttcctctcttctgcttataatgacattaagagtttcacgttatgtgaagaaacttaacataagagggagtggggtatatgagaaagaaatggttggtttccatgttagtaatgcttactttgttcgcttttccggttagcgcatttgcggctgcggagggtccgactaacattgaacttcaaagtggtttgaactcagcctttacgtttctggctgttgtactcgtgttcttgatgcaagggggatttgctttacttgaagcgggttcaacacgaatgaagaatgcaggacacattgcgggtaagaccatcctgacattgggaatttcagttattgccttctgggctttgggtttcggtcttggtttcggtaatggtaacagcttctttggaacaacaggatttttcctgagcggtgacaagatggctgcttccttcgaatcactggctttctccgatgttccactgactattaaattcgttttccacctcgcttttgcggcggtatctctggccattgcctgcggtggtatggctgaacgtgcaaaaatgagcgtatatattgtattcggtacactttataccattatcatgtatccggttgttgctcactgggtatggggcggcggctggttggctgagctgggtatgcaagactttgcaggatcgacggttgttcacttgactggtgcgactgcagcattggtagcgacgatcttgttgaaaccacgtattggtaaatataacaaagacggcaaacctaacatcattccaggtcacaaccaagtgtattccgtactcggggttattatcctctggatcggttggttcggattcaacccaggtagtacattgtctgccatgggagatggattcttcggttatgttgcattaactactaacgtagctgctgcagccggtggtgttgctgcgctgttgatctcatgggcagtacttgggaagtctgatattcctagcatgttaaacggtgtgcttgcggcactcgttgcgattacaggagcatgtgcattcgttgaaccttgggcagccctggttatcggtgctctggcgggtatcatcacattcttcacagcacagtacttcgatcgtaaaggaattgacgatccaatctacgctttctccgtacatggtattgctggtatgtggggtgcgatctccacaggtttgttcgctactcctgaacttgccgagaatgctggtgtaggtcaagcgggtctgttctatggcggtggattccaccaattgggcgtacagcttctcggtctggcaggtgcttttgccttcgtactggtaatgtccttcattattctgggcggaatgaaagcgatcatgggcattcgtgttactgaagaagaagaaacaatgggtctggatatcagtgagcacggtacttacggataccctgaacaaatgaaaaatgtagattctaaatccaatggcggtacgttcagctcctgaggtgaatgatgctgaatcatgcttcaaggaggctggacatgatggaacccatctcgtatacaaactattcctggtcttatcagggaatcgatggtgcggtgtcttctcaagaactgcgccaggcacgtgtaatattacagaacgagctccaggaattgttgtccgcttccttgtggccgatcgagtggtaccaaacggtaaatgaactgcatgaccggattgcacggaaagcagtagagttatgcattcaggggatggttgaggaaggcttcggccaacctcccgtcccctatgcctttatcgtatttggcagttccggcagggaagaagcaacgttatggagtgatcaggataatggcatgatcattagcgatactccacaagaaggtaaagaggaatattttgctcagctcggactgcgaatgacggatatgttagaagagcttggttacgccaagtgcgaaggcaaagtcatgtgctctgagccactctggagaaaaacgctggcgtcatggaaacaacaattagcagattggagctcggatctgaattgggagcctgttcgtaatctgattattgcttcagacatgcgttttgttgcaggtgagcaaagtctggcggaggaatggatcacgagtttttatgaacagttcagactgattcctgaactttcggatgcggttcttcgcaatacggttaaacataaagctacattaaatgtacttggacgtgtggtcacagaacgatttggtgaacatgcaggcggatttgatatcaagtatggtttgtacattccgctggtgaacagtgctcgttatttggctttgcaacatggaatcaaggagtcatctacgttaaaaagaatggagagattgacttcacttgaagctgttccatttacattactggatgcatgccagcgagccttcttagccgctttgaagtttcgccgaagtactccggttgtcatccaaggggatttgcaacatagcagtgggttcctggatgaaaaacagatgaaacaaaagcaaattcattatgagctcaaggatacgctcgggttggtacgacgagtgcatcgtgctttgcaaagacagttgcgttttgcagaaaggagacgtccatgagagagccggcaaggggcaatacaggattctggaattcgctgcgtcagggaggggtcccttccgccatcgcttccattatgggagcccctacggcgcaacacatggcgtttatccgttcgatgatgagagaacagcgcaggcctgaggttctgcatacacctctaaatgagctggacgcagttgtatttgatctggaaacgacgggtttttcgccccagcatggggatgagattatttcatttggtgcggtccgtatacatggtggtgtggtagtggaaggggagcagttctatacggtggtgcagtccaagactgcggttccggaacatattactgaacttacaggtattacgcaggagatgacgctggacgcaccaactttgctggaagggctgcatgatttcatgtcttttgtaggtggaaatgttctgattgcacacgcaagtgcgcatgaccgagcttttctgaatgcagctctgtggcggacttcaaaggtaaggctgacacatcgtttaatcgatacgatgatgttggcccgctggcttgaaccgagcaggccggggtacggtttggatgaattgctggaatccagagggattccgatctgtggacgtcaccatgcactggaagattcaaaaatgactgcacagttatggtcctgctacttggaggacatgactcgtaaaaatgtggagaccttgggtgatctgtatacccagctaagtcacgcataacggaacgggaagcagattgtatgaaggcacaatgtgttgtgccggatcctgcgattccttcgaagattcaatccgataaccgttcagatgcatatgagatcgcgacccacttgttaggtcaggtgagccgatgaggtacatctgaagcaaacctgcgaaggccggaagcgcttggatgtcctctaaggatggaacgggccttgtatgcggatgagaatggaagataccgatgagcttgggctcggagaatacgcaccgaatccattcggcatcgtccagagtaaaatggtgcagcgggtcaggtgctacgttacgaatgggctgaaaccgactgattcgtataccgcccgctgcggtttcacccagcataaccccgcaggcttcttgtggcagcgaaaggaacatgtgctttgacatctcttgttctacggaagaagggatgtagaaggcgttttgctgcccgtgaagtgctgccatttgtattcacccctctctctttggctcctgctatggcaggagtcctttttcattttattttctgtgatgcggattgtaaaattttaaaggaaaagggtacaataataaagagaacatttgggaatcatgttctggtgaactgtcatagagcgtgataaacacttagcatgtgcagaaattacggtttcagtttcaatatgctaattatataaaagggtggcgggttatgaaacgaaacatatacatactccttggtgttgtcttgctggttggtattgcactggcccagaatgcgggtgacggcattgcagccgtctttaagcaggaagaacccatgcctacagagacgggaccacgcgcgggtcttctggcgcctgctttttctctgacagcaatggatgggaagacgtacagtgtgggcggtgccaaagataaggccacgtttgtcagtttctgggcatcctggtgtgagccgtgtaagcaggaagctccggagttgaacagaatggctgagaaatacaaggataagcttgacatgtatggggttaatgtaacgtcatacgataaactcaaggatgccaaagcttttgtggatgagtaccaactgacgttccctattcccttggatgagaaggggactgtgtatgctcaatacaatggggtggcttttccaacgaatgttctgattgactccagaggagttatacaggagattgttctgggcatattgcctgagaaagagttggaacgtaagattaaaaagttaattgcgaattaattttcatgtaaacaaagaagcctttgcatccatgaatcatgggtacagaggcttctttttattttccgggaaataagcgttaagaggttgttcaaaaaacgcttttttgaatatatactttagtggttgcttatcccatgagcaggaatagggagtgtgcccggctcatcctgtaatttttcttgaagcaaagcatagcggaaactgtgaacgagcgcttcccaacttgcttcaattacgttctcggatacaccaacagtgttccatgtgttttccgtatttttggattcgatcaatacacgaactttggcagctgtagcatccttctcatccagaacacgcactttgtagtccgacagatgcatgttggaaagtgaagggaaatattgcaccagcgctttccgaagggcgttatcgagtgcgttaaccggaccattgccctcagcagcggtataagcgcttgttccagcgatattcaccttgacaaaagcttcagaaacaacggatttgcccgccgttttctctacaagcattttgaatgattcaaacgtgaacaattctttcatatcaccgttcgcttcacgaattaacaattcaagcgaagcatctgcaccttcgaactggtaaccctgatgctccaagtctttgatcttctcgataatctgacgtgaattggcactgcttggatcgaactcaagccccagttcctgggctttggatacaatgttactttgtccggcaagttcagagaccagcacacgttgtttgttaccaaccagttcaggcacgatgtgttcataggtacgtgaatcccgaaggatggcagagacgtgaattccacctttgtgagcaaaagcagcattgccgacataaggctgattaatcggcatattcacattggcaatctcgctaacataacgagccacgtttgtaagttgtctcatggaatcttcagtaacacattcataaccaagtttcagttgcaggttcgggataatggatgcgagattggcgttaccgcaacgctctccataaccgttcatcgttccttgcacttgacgggctccggcttgtacagcgctgagtgtgttggccacagccaattcacaatcattatgtgtatggatcccgagatgtgcatgaggcaggcttctatgcaatgtggatacgatctcgtgcacctcgtttggcatcgtcccgccgttggtatcacacataacgagccagtccgctccagcttcgtgggccttggtcaagaccgcttgagcatactccgggttatgtttgaatccgtcaaagaagtgttctgcatcaaagatcacttccataccattctgtttcagataggcgatggaatcatagatcatggacaagttttcttccaatgtagtctgcaaagcggtatgcacatggaagtcccatgatttaccgaccagggttgcagcctgagcaccagattcgatcatacgcttcaggttggcgtcttcactagcaacactgccttttcggcgggtgctgccaaaagcaacaacctttgcgttcaggtttaattccttgactcttttgaaaaactcaatgtccttggtattgctgccgggaattccgccttcaatataatggacacccaggtcatcaagcttcttggcaattttgagtttgtcgtctgccgataagctgacaccctccccttgtgtgccgtcacgtaaagtcgtatcgaagatggaaatggcctttgacatgaagatcctcctttgagataaagcgctcttttaaaagtttggattgtaagttgggaaaagctgttaagtacgttagtggacgaatccttcgattcggcaacgctacactgtgttaaactcaatgcgctgatttgtcctaaagtcgtcaatttgtataattaattattatagcaccattatagccaaatgctacatagaaatcgcagtttcatgtaacaattaacgtattttagagaaaaaagaaggatgttaatcataatccggatgtatgttataatctattattgagttttaattgtaatatatggaagaaaaggaggggtgattttgacttttttatgggaaaatacgattattgctctgatcactttgatattttttgtgagtgtaggctggttaattattcggtctctgatcagatctcgcagaaaataaatgctcgtgactgaattaacataacgggtttgatatactatagaagaaagaaattcgtttcattaattagtgtgcaagaaagggcgggggttcatgatgtcttcagacggcaatcctccagcaaatgtggatcaatattaccctgcagccggacgggtaattctgcatgtcgatatgaatgctttctactgctctgtacatgaagccgaggaaccagatttatatagaggaaaagcaacggccgttgcgggcagcagtgaactgcgaaagggtgtaattgtaacctgctcatatgccgctcgtaatcgaggcatctcaacaggtatggttgtgcaccaagccatgaaaaagtgccctgatctcattgtgatacgtcctgattttcatttatatcgtcaatattcaagagccttcatgcagattgcgtatagctatacgcctcaacttgaggcgacatccattgatgaatgttatcttgatattacaggttcaaggcaattcgggaatccaatggagattgcggagagcattcagcggagaatcaaggatgaattggggctgccatgttccataggcattgcgcccaacaaattactggcgaaaatggcttcggatctgaaaaaaccgaacggtatctccattttacgcatgagggatgtaccccggattctttggcacagaccatgcaacgagatgtttggcattggcaaaaaaacggctgaaaagttgaaaaaattgggcattgaaacgattggtcaattggccaagtcggatgagaacatgttgaccgaactatttggagttaatggagcatggctcaaaaattccgcgaatggcattaaccattccgcagttcacgcggaacgtgaggccaataaatccattgggcatacaaccactttaccggcggatgtatcggatatgaatgagattcatcgggtgttcctcaatataagtgaccaggtagccagaaggttgcgcaagcacgaaatgttctctcagggtattcagattacaatccggacaccggatatgaagacaatcacccgatcacgtctaatggaagttcctacggaggatgcaacggtcatttaccgtgaggcctgtaaactatttgagaagcattggggtagtggcaaacctgtacgcatgctgggtgtgacacttcaaaacctgattccaagagaagaatccgctgtacagatggacttgttcgaatatgagcagaagcccaagaaggacaatctgattcggattatggatcagttacgtgataaatttggtgagaatgctgttgtgaccgcaggcatgcttggagacgatccttccgtgctgcttcgtaatcataaagtgcgcggtacttccctgcaaaaagataacttgcaaagtcttgattaaataagggataatagagacttgtggttgcaaaatgtttgtaattatccttactttgtattaatatgtttctagataaaaacactgtacgtttcgaattttaggaggagagaatgtaaatgagtaaatatacttgggttgaaaaagacacatgtatcgcatgtggcgcttgtggagcaacagctccagacatctacgattatgatgatgaaggtttggctgaagttatctttgacggcgatgctaaccatggtgtcaaagctattccagacgacttgtttgacgatatgcaggatgcatgcgatggctgccctacagattcaatcaaagtagcggacgagcctttcaataaagaaggctaagtatttctcacatgaacatagagcactttcttttgtcttaacgacaaaggaaggtgctttttttgcattcatttaactgtgattatctgactatggatcaaggacgaacattgtcgaacccccttttttccaccgggtactcaagtcctatggattcaacgcctggttatgccgatatataatgatatacggaaaaaggcgaaatagtggaggatcggatgcaaaatactcatctaagaacatatgtcaagaaacatcccgacaataaaatggcttggtacttgcttggaaaggagtatttgggcgaaggacaggaggccaaagccaattattgttttcagcaagcgggcgaggtttatgaggcatttgaacgtagtaaagctcctgcggacatctgggtagactatcaggataaactggtggagatgtctgagcaaaaagagaaaaaacaacgtagacgcaaaatgtggcttacattgttaatgctgcttgtgctggcaggtctgccacctgcggacgctccgggtttcagtcgtgaagcagctgacgcactgtcagcagcactggaatccacagatgacatcgaagcgcctgtagaagcggataaacaggttggaactgcatccaatgcgccaagcaatgtgttcactgctgcggcatttggtggaggtaatcatggcgaggctgcgctcgcagctgcctggtccgggtctggcccaaaagtagagacttctgctgtactgggtatgcaaacctcggatgactggtctttatggaaacgaaatatgcctgtgaaatacatagtacaaaccaatacaagcgggaaattgactgcacagagttatgatgccaagcaatgtaactgtgaacctcctgaaattacaccgaaaatcaaaaagatggccttggcgtggaccgccaagcaggaagcagctgcatcattatcaagtgcaatcgttgcctatcgcaaaaaaaatgatgcttggcccaagagtgtaacgcaaatggctcagccatttccgaacaatattctgggagagactgcgtcagggatgaccgagatgtttccgaagctgttagctctgcatcaaggaaaggcaaaggaaggaaagaacgattcgagtggtaaagagaatggttcaacatcttcgaatttgtctcaaggcaaaaatgccgcttttgcagatacgctgggaggtcagccttttttgcaggaaccgctggagattgtcattgataagaataaacataaacttgcattaattagtggggataccattgttcgtatgtatgatgtgggacttggcggtgatcgaacaccggaggggtcatttgtcattacagataaagtggtcaatccgaatggacgctcgaacggggagttcggaagcagaggtatgcaactctcgaatacgaattatgccatccacgggaccaacgagccagacagtatcggactggatgagtcccttggatgtgtgagaatgcatacaggagatgtagaagagttattcgctcttgctccgcaaggcactccggtacgcattggagaagatgtactgccagatttgacgcttgttccagaagcaaagcagcgttatcagcatacgcttgttccaaagcaaaataatccgaacaaaacgtatcactggctgaattgatctgtttgatatgtagaatcagatggattcagcctgaatcatctacatgttggcaataatgataagagcaccaatgatgatgatcaagccgcctacactggctgctgtccatgcaatggctttgcgattcacttcttctttcttttgctgtaatgcaggtggtttacgtttgggagccatgagttattcctccttatttggaatagaactggtgtagagtaaccatgctctcattgtaaagaattcaactcgtcatttccagtgggcgggtggatttcttgtgagcattttgtattattcgatttgtgctgtctatgcgcaaactactttcctttttaataagaaacagataaacttgtgagtagagtgtttttttacatatgaaaagacggacaacggctttttggcgtaccggaccagaacggagtgagtgatttgttatacagaagtcttgctaaacctttgttgttcaaaatggaccctgaacaggcccatcatctgattattggcggccttagtggcgtgggtagcatccgtccggttccttccggactgcgtgtgatgtacggcgttcgggaaacgtctgatctggctgttgacatgtttgggtgtcatttccctacacctgttggtctggctgcgggtctggacaaaaacgggcaggccgtaacgggcttttcttccatcggatttggattcatggaagtgggaaccgtgacaccacttgcacaaccaggtaacgatcaaccacggctgttccgtttgcctccagatgaggcgttggtgaaccgaatgggcttcaacaatcttggtgcggaagccatggcaggtgaattggcacgtctacaggatcggcgtattccagtggctgttaacatcggcaaaaataaggcaacttctaatgaggaagctcacttggactattcgaagtgcattcaggcactatacgattatgctgatctgttcgtggttaatatcagttcaccaaatacaccggatttgcgtaatctgcaacatgggaatgaattgaaggaactgctcgctgcggttatgaacgagatgaacgtgcagcatgcacgagcgggcggagcgaccaaatccgttctggtgaagattgcaccggatgtgaatgatcaggaacttgaatatatggttcgcacaattgcagacagcggtgttgctggcattattgctacgaacacaaccatcagtcgtacaggactttcccaccaacatgcaaaagagactggcggtctgagcggtaaacctctacgtgaccgttcaacggagattattcgccagatctatcgccagaccgaaggcaaacttccgattatcggttcaggtggcattttcacaagtgaggatgcatacgagaaaattaaagccggagcaagcttggtcgaaatatatacagcattgatctatgaaggacctgaggtgaatcggcgcattcatgctggactgcgtgagttgctgcgcaaggacggttatcgtcatatctctgaagcggttggtgcggagcatcgttaagaaggaatgtgaatccccggaatgaaaatatagaagcatgggaagagcgtaaaatggttcgggactcttccccccaccaaacatcatgtataatggaatagaacaggggacgctatagagacaggaggcataagcatggacggtagagactggggtacatttttacttccttatgaacaagcggtagaggaattgaaagtcaagtttaagacaatgcgagcggaactgaagaaacgggaagagtatgccccgattgaattcgttaccggtcgtgtcaaaaaaatatccagtattctggagaaatccagacgactgaatgtgtcgcttgatgacgtggaaacaggcattgaggatattgcaggtatccgcattatgtgccagttcgtggatgatatccgtcgggttgccgagtatattcgaggccgtaaggatctcacggtactcattgagaaagattacattacgaatttcaaagagagcggctaccgaagcttccatatgattattgagtatcccgttcaaacggctttgggacaaaagaaagttttggccgagatacagatccggacgcttgccatgaacttctgggctaccattgaacattcgctgagttacaagtttcgggaagggttacctgatgagatgagaaccaggctgaaaaaaacggctgaggccgcgtttatactggacaacgagatgtctgcaattcgtctacaaattttggaggcgcagaaggcatttgaggatgattccaatatcgtgtcaagaacattgaatatcattcatcaattatacttctaccaccttgttagtgaagcaattgaagcacagaagcgatttaacgattactgggaacggcatgatatggaagggctcaaagacttgctggatgacgtgaagaaacttctgaacaacgccagaaagggcgaaaacccggatgagcatctatgagccactgtacgttgactatttaatctacttcaatcgggatcaggattatttcgagtgtcatgaggtgttggaagaattgtggctggaacgtaaccgggattctctctataaagggttgttgcaaattgcagttggtttataccacttcaggaatggcaatctccgcggaggaacgatgatgttacagagctcacttgatcttctggaaccttatcctgctacgactctgggcattgagcttgggattttggtacaggaagtaaaggcaatcgtgaagcaactgtctgagcctgacgctcagtctgtgacttatagggatttgtccatacgaattgttgatgaggtcttagaacaagagatatctagaagatcgcttgagctaaaaccaaatattccgcaacgccggagtcctaccagagggcgaatatacgaagagaagatgaaggcgatggatcagagtaaaagttgaaccgtaatcacgttaacattcaaatgagcatcccatggatatgaagttccatgtatatgaaacaccccgacgattcctgtaaagggaaagatcggggtgtttttgaatgttgcgtcatattcagatgattgcaggtggcacagcctgtccttcaacagaacagtttctggtgatacaagtacctgattgtagatacttgtgggaacggatctagcagttagcttgccgaaggagcggcactgcctttatatttttggaaaaattgtttgtaatcatccagtgtgtagccttggtcactgccattctctttcagtccgccaaccatacggtctttctcgacaccagcctcataatagacgagtgtaggtgtgaactcgatattgtaatcggtccatcctgcttcgaattcacgcagattgaactgcggaagctcaataccttcactgtcaaccagcggcatcaactgaggtgttgtggcacggcagtgcgagcaatcggaagcaaagaaataaacgaaaaagctgtctttgttatcgattttggctttgagatcagtgggtacaataatttgttgatagttgggatcactaagtagctcccgtgtagctggattaagcttggaagcagcgatgccataagcattttccactgaatccatctgtttcttggattgctggtctacgacaaccagtgctgcaatcataatgattaaaatacccaggaaaataaggatcgcagcacttttctttttcttcttggatttcattggacatcccccatcgatcatatcgaaatatagtttgggcaaaaataaaggttgggataatatgcataaacacccgaatttttgctcaggaatcaatctacttgccattatactacattacacgctgtagtggaatagatacgatatgataggaaagcaaagcttggatatgataaaataaaacgatattgcaatcttaccaagacaggatgagtgggaatatgggtgtaaagttacctttgatatttgctgagcgaatgaaaagtttgctgggtgatgagtttgaacaatttatgaaatcttatgaacagtctcctcatgcgggactgagagtgaatacgctaaaaatatcgatggaacaattcgatgagattgctccgtttgatctaagacctattccgtggtgtgagacaggattctatgtacctcatggtgttaaaccggggctgcacccttattatcatgcaggcctgtattatatacaggaaccaagtgcaatggctccagttgaattattgcaggtggagcctggagatcgcgtgctagatctatgtgctgctccgggaggaaaaacaacacagattgctgcaaagctgcaaggcaagggtgtacttgtcacgaacgatatccatgctgaacgcaccaaagcgctggccaagaacgtggaactgtacggggtgcgtaacgcggttgttttgaatgagtcgccagagcggatcgcaaatgcatttcctcattattttgacaaagtattaatagatgcgccttgctcaggtgaaggcatgttccgcaaggatgaggacatggtgaaatcgtgggaacatcattcggtggaaaaatgtgtgctcatgcagcgagatatcttggagactgcggcacgattgttagccccgggcggaactatcgtgtactcgacatgtacctttgcgccggaggaaaacgaagcaatgattgcggagtttctgaatgtaaaccatgatttcgttgtcagggacattcctgaagaaaaaggattcgctccaggacgtccggaatgggtacgtaagatgatgccagagaaggcagaggagacggaagctgtactggatcaaacgcgtggcaccgcaagattgtggcctcaccttttggaaggagaggggcattatgtcgctgtgttgcagcatcgtgcagggcaagaaatagaaacagatcaacctggagtagttaaagaaggagcaatggagtatggacaggtcgtggatgtgtccaggattgaagcagaggggaacaacgatcactctattgctgcttcttcaattgctatgaccaaggctgatcgtaaaaaggaacgtttattgcgaatcgaatcccgagagtcccatgacagacaggctggtggaggcaagaattcgggtagacagagtaaaaaaggtaaagatcacggtggacgtaaatcggaacggggtcagggacgcggagctgatccggcaagtattgatccggttgcgatatacagtcagtttatgaaagaacaattggagattgagttaactggagagacggtatgttacggagatcgggtgtatcaatcatcagttggtgcagctcggttggagggactgaaagtcattcgtccaggctggtttatgggcacgattaagaatggacgatttgttccgtcccacccgcttgcgtgtgctttgaatacatctgaagcacggcgaagcgtaaatctgtcatccgctgatggcgaagccgtgagatacctcaagggtgaaacgttaaatattgaagaagaacgagtggtgctcaaggcggatacgtttgccaaagggtatgttcttgtatgtgtagatggttatgccgctggctggggaaaatggctggatggtgtactgaagaatgaatatccggcaggttggaggtggacatcggtatgagtggaaaaggaaaacaaacgttgcgtctggacaaaatattaagccatatgggtgtgggaacacgaagtgaacttaaaaagatggtgaaacaaggcagaatccacgtggacggcaaagcggtgaaagacagcggggtacaggtgaaccccgaggtcaacgtcattgaagccgatggagagcggattgtgtatcgggagatgatctatctgatgctgcataaacctccgggtgtcgtgtctgctaccgaggacaacagagataagacggtactggatctgctgcgcaaagaggatcgggtgttcaatccttttcctgtgggacgactggataaggatacggagggactgctcattcttacgaatgacggtccacttgcccatgatctgttatctccacgcaagcatgtgcccaaaacctatgaagcccgtgtgctgggaaacgtggatgaagcggatgtgcaacgtttcaaggcgggcattcaattggatgacggatacgagacgctgccggccgaactgactatacttggtcaggaagagacggaagaaggtacgatctcgtcgatctcgcttattattcacgaagggaagtttcaccaagtgaaacgtatgtttcaggcggtaggcaagcgtgtggtctatctgaaacgcgtagccatgggtgagctggaactagcttccgatcttgctatcggaagctatcgtgaactaaccgcagatgagttgagccttctgcggaagtaaaagctcccgaccttcgcgaagcagagcagggagtggtggagggaagcgaagccccgatactaacgccgaaggcgagaaagctcccgtccttcgcgaagcggagcagggagtcgtggagggaagcaaagccccgatactaaccgccgaaggcgaaaaagctcccgctcttcacgaagtgaagcagggagccgggcagagagcgaagccctgcccgtaatggtcccggttaagcttgggcgggaccgccgctgaccagcggtgtgcccggcaacaagcgttcctacgacaaccgtgacatagcaagacccgacctaacaccggtgagcaagacgggagtccagagggcagagctctctggggccctccctcggaagggagggtttgggtgggtgcgactactaacagatgaggatgaagccagatgacttataaattaattgcacttgatgtagatggaacattgctgaatgatcatcatgaacttaccgaatggactcaggagaccttgatccaagcttcccgtcagggagcagagattgtcctgtgttcaggtagaggtcctgccaacacgattccttttatggagcagatgggactggatggatatgtgattacgcataatggcgccgttaccgcgcaagtcgatacccgtgaggtggttcatcattttgcattagatggacaaggactggagccgatcatatcctactgtcgagccaatggagtacattttgacatcaatacagcatttggtctgtatgtggatcaaccggaaggtttggggttgcaggtgcgtgagatgtattacaattttatggccgagccactgaagttacccaagtgggttgacatgacagaaccgctggcgaagttcactgcatttggtccgattgaacagatggatgcagtacttcaggaatggtctacttggaatctgccttattatatgacacggagtggtgacttttttattgatctgatgcatcccgaagcgtccaaaggcgctgcactgaaaaggcttgctgaatcgaagggaatcctgccttcggagattatggcgattggtaactacttcaatgatattacgatgctgacctttgcgggcaaaggcattgccatggataactccccggacgaggtgaaagctgctgcggacgaggttacactctccaataacgagcagggtgtggcacacgcaatccaaaaatatgtgttatccgtctaaccctacatcttatacttaaaatgcacactttcctcataatctaccgtcctcaggggcatcctaagagaataacgttaggaatggaggaggacacgtgatgaattatgatgtggaattggttgcagacctgcggacatcaggtggagaagtacaggacgtgatggtcaatggtcaatatgcaggctcactgttccttgtgtatagagaaggagatcgtttatcaggtagtcttcagatcgagcaggagtctctgccagatgatacagagcaacgtatcgtggaaaaagtgcatgcctatgttcgatctcttgcagatgcgttggaagctgcgtattatgaagtgctggttagttgtggctcattacatacggttctgcatatgcctgagtcagagacagtgtggccgtctgaagagatgaatcatgacgaaggcagctatgacgatataggtagcagtggaagtaaggtaatccctgtttcacaagccgaatcgtttacatatgaagatcgggatcaggttctggagatggagatggtaagcgcaggacgcagcatatcgacgtatattttcaatgatgtcgaagggcaggaactagcagaagcttccttaaaacaatatggcgctgatgtacaaggtgaaatacactggtatgacgagccggaagagaatcaattggaagctgcggcagagttactggtcagagagctggatgaagatatcatcgatacgattacaatccgcatgtggcatcagggcaacgaactcgagacgctagagtgggtacatcgcgatttctccgaggaatttgaggataccgatgaatcggatctggatgagttggaagctgctgaagaaacatgttatgtcatgctgaagcgtaaggatcgggagttccgggtatatgagctgtttcttcaggagcgaggtggattgcctgtgggaacagcaactatagacacttctcattccgatctgacgggatacattgattacgaggttcctggtaccagcattcagcgaaagagcctggtcgaagtgttgatgcaggagttggacaaggaaatggagtttgacaccttgcacctgacgatgttgtatcgaaatcagattattgatgaagccagaatagatgggtaaagggcaaccgccttttacctttttttgttctcgttttgacgaaaaatccatttcccggtatagtaccattagtttaaaagagatcaggaagcggaggagaacaatgatgcactcattcaggatcagtagcgaatataataacgatggttttcaagcggttcaggcgaagccggaagatacggaggatgtgatgtcgctgctggtggagacagccgaatggttacagagccaaggttcttcccaatggaacgctttgcttaaaggtgaagattcacatgatacggcaggggcgattcgtcgtggggatgtgtttgtattcaaaaaaggggcggacgtagcggggatggtcatccttttggttcagccaagtccttgggatattcatctttggggttcaaaagctcatgccgaggatggcgcaatttatctgcatcggctagcgattcgaagaaaatatgctcagtgtggtttaggacggtccattttgcaatggtccagcagcgggatacattttgaaggcaaacatactgttcggttagattgcggagcgagcaatgctacgttgaacgccttttacgcgcggaacgggtatacttttttgggagagaccgatggttacagtacatatgagaagcccgtggagctactgagctgagaattctgactatcctatgaatatgttgacgacaaccgcaagcgatgggctgctgaattagagcttttgcttctgaggggaacgtttcatgaatatgttgtatatacgagttatcgtaatatagatgttccggcttccctatgtcataatggatagtagagtagtacgtaagttagaaagggggaaactaacggtgaaattgctgcaggcgcttttctttcctccggagcagcccggaggtgtatcctctatgattccgtatatgcaagagagatttacaaccccgaggtgggaaatggatctgttctccttgccaaagcgaattcgcaacaagggcagagaggaagttcagtttgaaacgtttgactggacggaatatcaggatagtcctgttgtccaaaaatatattcaaacttatcgtgattatctttggtggaccaaactgcgtattcagaagccctatgatctgattcatgcccaccatccaattgcaggacttgcgatgaaaacagttttcccggatacacccctcattcagacgattcactccagttatgaacgagaattaatccttaatggacgcattgaaacggatggaccggagcatcgattcctgcttgcgatatatggtgagctggaacaccaggcagagcgcctcttgacggtgtcggattcgttccgtcgttatctcgctccctacttgaaggaacctgatgtcatcggtgtgattcccaatggatttgatgagaagcgctttaagccgatccctcatgataatgcgataccacaactggtcacggtatgtcggcttgtcccggcaaaagggttggatattcttttcaaagcttgtgcggaactgaaggaccgaggtcatgattatgtgttacatattattggagatggaccgattcgtcctgatctggaagaattggcgcaacgattggggatctataatgagaccattttctatggttacacactgcaccctgaggaattcatgccattctttgatatttttgtacttccttcacgggcagaagcatttggttccgtctttgctgaagcggcgctgagttgtcttgcccttgtgggtacggatgtaggtggtataccggaacagatcgagaacggtagcaatgggttgcttgtaccggcagaagatccttctgcattggctgaagcgcttgaaaaggtgatgctggatccggcttatcgttatgaacttgcccgttcagcgtgtgaaaaagccaagacacattactcgctcggcagatcagtcaatgagctgaaaaagatgtatctacagtttcctagccaagcctaaaacgtagagcaaaaagtgcgagccgctgtgataaacagcggctttttatcatgtttaaggaaagagtcccgcggtgaattgtggttagaaggcaaacggatgctcatattcatgaaatacatggaccgtgagatttatatattgttgcgtttacgaaaggtgccccagcggttcagtaccaatttggcagcccagattaatgccatagttccaaagatggggtaaaggatggacagcagggaactgaatccaaactggctgagtgagtaacacaatagcataatggttaatgtaatgaaacggggatggacacgtatatgttgtctcagttgcaaggtcattccatagatatcggctacaaaggtagtgaatatttccatgaaaataagggatacatatacagattgcactgcccatccaagttgaaaggcaatgctgcccatcgggatttcgaattgaatgatgccgggcatctgagctgacatggcaaaatgagctgccatcagcatgaaaccaacgccaattccacccaatactccaccccacttcagcacattccgactacgaatttggttacctacaggcacaagaacagcttgagccaacaccagattgaatgaagtatacaatagtggagacagccacacttgaatagggtttgagtctgtcgtcagtgtgatgaatcgggaagcacctggatgatggatcgtactggtgatcatgagcagagataacaggagcatcatgggcacaacgatgctattcatttgtaggatggcttgaatgccccgaccgagaagcagatatgtccctacaagtgtgacgatcagacctgtctgataatgcaaacccagatgctcgacaaaaacggagcctgctccggcaagcatgacactgttcacgccaatgagaatgagaagggtcacccaggtgatccatttgcccgccttatggccgaataaatgtttgttcagatcctcataagagcgggacccggtatcgtgagcgatcagcatcattttggtacctaaccagacaaagagcatggtggataagcctatggtgatggtggcccatttgccatactgggtaaaaaactgcaaaatttcctgccctgtagcgaagccggctccgacaaccgttccgatgtatgtaaatgcgatctgcagcacccgaaatgcctgtttcatgtgtttcccctctcaggcccctgtatagtttggacatgcgggtaccatggtacaaggtatgcttgacccacgaaagtcatgacaatcgataatgagctttggcttgaaatgcgtctcaaggacggcgtcaaggcaatttcgcttgaacttatagatagatatatgatacttttacctcataggataggcttgggaggtcaaatcatggaattattgaaacaacgaatattacaagaaggtgtggttatctcggatcaagtattaaagctggatggtctgttgaaccaccagattgatcctgcattaacgatggagatgggacgtgagttcgctgcccgttttcgtgaaagtggagtaactcgggtaatcacggtagaatcctcagggattccggttgcgtttgccgcagcctatgaactgggggtgccacttgtattcgcccgtcgcaaaaaaacacttctggctgatcctgatgcttactgtgaacgtgtaccgtcctttaccaaaggaattgtaactgacattatggtatcccgcgagttcattcatgagaatgaccgcattttattcattgatgatatcattgccaatggagatgccgctcgtggcgtcatcaaaattatcgagcgttccggtgcggaactcgtcggattcggcgttgtggtcgagaaaagtttccaggcaggggcacgcacgattcgtgaacagggtattccggtggaagccttggtacgcattcgttccctgaacgatggaacagtacaatttgacgataacgaaatgtgacattttaaaggaatagggcctattttttgaactatgcctttgcatgaccgccgatttcatttataatggggttatgttagggagaggaggcaacaccatggggaaccaaccggcaacagaacaattttttaatgataagctggcggaatcgaaagttcattttgaacgtgccctggattgtaaacatacggaattcgatgacctttatccctatatgattgaacatcctcaatttttctggtacaaacgctatgttgcctggtcagaattactgacgattgtaggcttgtgcgaagagttgtccttctcttggaaagaacaatttacaccgcatcaagtggagtaccttgaagaacgtgtgatgtccgccaaagtgcttgatttttggttcgagaagaacgacagcaaagagcacgcgcagcggtaactttcagtcgggacataatttcgaatgacatgacagtccaatacagtcacgtgagacctaaatgacttttcatttaggtctctttttgtaaataaatttgaaattaggagccatgaagatgattagtgatacagaattggacgccctgcgtctgtcaggtgagaaagttagagtcgtacgggacgagctggaatcgaacgacgtgaaggggattgtggttgcctgggatggcgagcaggtacttatacgtcgtcagaatcgacgtgtagttaagctggaccgaggttacagctatcagctgttcagcgagcctcgccagagtccacttagtgagtaacagcttgtaattatggcagggccatgagcgttaaatgtttggaattaccatgatttcttggcataattggctcactcgggagagaagataggtacagtgaggaagatctgtaactatagccgagagggtgtgctacaagccatgacattgatgaatgataaagttcatgcctacaaggatcagattggagcattaagcgatgtgctgccaggtgtggtgaagtcgtatcatgagtttaccggagaatgtttccaacctggtgtgattgatgcgaagacaaaacagctaattgcgcttggcattggattattcgccaacaatgaggtatgtaccttctaccatgtagaagaagcccgtgctaagggcgcaacagatcaggagattatggagaccgtagccgtggctggagctgttggtggaggacatgccctgtctcagggtgcgatgcgagtgcagaaggcgctgcattagtaagcaatgcaacatacatttttaagtgcaaaaaaggcatccggttaataaccgatgcctttttgtatgtgaatcacattttacctaacattttatcatacataaactgtccagttacccgacgtgctgttacataacgatcattgaagtatggattcgataacttcgtgatgcttacacctttactgctggaggcatgagcgaattgtccgccgccgatatatacacctgtatgtgaaatgcctttgcctgttgtattaaagaacaccagatcacctgtccgaacattgctcttggatacgggagtacctgctttggcttgctgctgcgaagtacgtggtaattcaatgctgtatttgttgaaaagatatctcataaaaccagaacagtcgaagccggctacagttgtgccaccccatttgtaaggaatacctgtcatgttgttcactacggagttgatactgcttgcctctgtgcttgttgccccggatgtaaataatacagctgctccaaaaatggagataatcagttttttcaaaatcaatgttctcccttcgatgcctacggagttagctaagggttcggtagaaggttccctatatttcctatgtataagaataattcacccaaattggttcccccgttttcaaacatgaaactcggcaatgaataattaagtttttgtaactatttgaaactatattgcataaatgcgtaattgtcaaacccatttaaaacccttcgtaatacctcaatgttagcggaattaaggtttttatatgaaagaagggatcaagtttgggtatcattcatgacaaaaacgtcattattgattcgtgtaagacgaatttggataaatagataggtttgtcatgagttaaaagaactattccgttatgtagaattagagagattatattcattaagttgcatatattgacaaaaatcgattttttgcatattatctgattatccaatccacatattggatgaaaattgattttattatgcaataaatacaaataaagggggttcggggcgtatatcatacgtaaagtagaagtggaagatttataaaaacgaacataggagagtgttacatttgaaagcgaagaaaataattacttttgtcctggcatgtacgatggtgttctcagtagttggaatggcagttctccctgtagggacggtatctgctgcagatgcgtcgggtactacagcgagtatttctgatattttgaagaaccagctgccggatggaggttggagaaaagattataaacagacaagtggagagtgggcaaagtccacgatagacaacaaggctacatactcagaaattagaagattggcgaaggaatttaaaaagacgaatgatccgcgttactccacagctgcaatcaaaggaattaactttttgatcaacatgcagtattcaaacggcgggtggccacaagtttaccaaagctccggatatcacaagcatatcacttacaatgatgatgccatgattaatgtaatgatcatgctggatgaagtagcagcacgcaaaggtgatttctcatttatcgacagcacacttgctaaccgcagtaaaaattcagttgccaaaggtgtggaggcgattctgaatacacaggttgtttcaggtggtaagctgacagcatggggacaacaacatgattccagctctcttaaaccagcgagcgcaagaatctacgaagtgccatcgctgacagctggagagagtgtaacgattgttaaatttctgaaaaccagacctgctaacgctaaaattaccgcatccattaaaggagcggaggcttggtttaacaaagtgaaaattacgggttacaagtatgaaagagctaatggagatagtgaaattatcgctgattccaaagctgcaccaatttgggcacgcttctatgagatcggaacggataaaccaatctttattggtcgtgacggggtagttaaatacaaattaagtgatattgataaagaaagaagaggcggttatgcatggtatggcaactggccttccaagctgtaatttgtagtatgcttccgtattaatgaaccaaactattagcagcagttaaaggtaaagcccgaatcgacatggacgtctgattcgggctttattgttattattttcagtgttgacatgatagattacgcatgatatattatttcttgtcgccgatatcgatgacggagatacaatatgcggtcgtggcggaattggcagacgcgcacggttcaggtccgtgtgggctaacccccgtggaggttcgagtcctctcgaccgcatctaataaaaagactccttaagctaacgcttaaggagtctttttttgcattttttgatataacactaactttagtgatgagtattcaagaggttagtgcttagctgcacgtacagtaaatgtcttccatcagccatacggaacgtttattgtgctgcggtaacattaacgctgtcaatattcggtccttccgatccggtggtgaccactttcaatgtattggtccccgtgttcatggggacctgtattgttttttcaacccaagtggaccagcttcccgtagccggaaagggctcgttgctgatgactttggttccgttcacaaaaatgtcgaggttccgagtgctgctttccagcgcataacgaaactttacgtttttggtacctgttgtcgtgttattaatgccgttccattgaatggccgaaccagtcatcgcattgaagttaacatacccggacccagtgtaaccggtgtagattgtttcaatggcagcttccgtaagtgacgttccggtctcggcttcatacgtcgtgccactgcctgtattcccgccgctatttccgccagtaacgttggcaacaaacgttgttacgctctgaggcgggagctgtgccgtgaaggctccattggatacgttaagcgaggttccgcttgccagatttcgactgctgtccgtaatccatgaggacacagtagaggcattaccattctgcagaacgaatttttggcttgtggctgaagttccacggttaattgccacgacgacgactttgttatcacctttataggctgagacaaatgtgttcgtatccggatttttcgttgcatcgactcgcaggtagcctggacgcacgaatttagagaaatgagccatattatacccgcgtttgcttatggtaccgtcctctttcatcggaccatactgtctgcggatgtaccaccacacgtaggcctgaaaatcaccttctaccatggcattgtgcatgtgataggaaacgtctaatgcttcaggccagcggtctgccgagttgttgtcactgtttggaacatacacttcagtcatccacagttctttaccggctcctttttgcttaaagagagggtaggcaaaattcgaaatctgggttccatacgtatgtgctcccagaatgtccatgttggcaagtgcctgcggatcattcaggattgggtcggatatgttctttaagtactggaaggattcaggcgccatgactttggtaccttggatggacccggcattttctttcatgaatcgaaggatctcttgtggagtccaccaagtccagtcatgagcataatccggttcgttttgtacagaaatggcatacagatctacgccgttatttttcatgtaggttacaaagtcgttcagatgttgcgcatatgcggtatatttgtcgtatttcagacgtttggcatttgtgtccccattgcggttgaatgtttcaaccatgctgcttggaggattccatggggatgcaaatacaatagcacccttttcgatagcccgtttggctgtggcaacttcacgataccagttattggaatctggatcaacgtagatcctgagaatggagaagcctaattgattctggtcattaccaaaagcggtttcacgttgagcgggagtcagatcaccaatccaggcaggaaggttaatgcccccaaagcccttgatcagctgtttttccgaggacaaattaatgttggcatcgctggctgctgacacatttgtcggggttaacatcaaaggcagggctgttaaacaggccaaaagaacattaatcgtcttttttagtttgaatttcactactttcatcctcctcgataatagtaagttacatagagaaaccgcaaccaggaataacaaacaagaatagcggattgtctggcatttattttatgtaaaccctttcaaaacctccttccataaatcataggatagaattgaagcatagaacctctttcatttgttgattctactaaaaaattcctaaactgaaaacctgacaaattacagtattttttctaattaatctctattttctaactattcaatgacagttcttgtctgaatgcaaaagggaaaactggaatgatgggggattcgcttgagatagaggtcttcaatgggcgggggtatgatcattaaggaaggctttggcttacatattcctcccttcattatcaaacaatgagatcacagaagttacggggagggaatcatgatgaaggtacagagaaagaattatcgattcattgcaggtatcatggcattattgattgtgttttacgcaggcatatcggcaggagggcctacagcggcagcttcagagtccacatcgaatcacaaacggttagcgattatcatcgatgatgttggtaatgacatgaagggtacggcagagatcctggcgatgccagtcaaactgacggtagcggttatgccttttttaccaacaacgaagaaagatgcgatggctgcacatgaaaagggaatggatgtgattgtgcacatgcccatggaacccaagaaaggacgacctgaatggctgggcccgggtgcaatcacatccaatctaacagatgaagaagtccgctcacgcgtggagaaagcgattgatgatgtgccccacgccattggcatgaacaatcatatgggttccaaaattacttcggacaaacgcatcatgtccattgtgctcgatgtatgcaaggagcggggcctcttctttgtagacagtcgtacgaactttcgctccgtggtgggggaactggccatatccaaaaacatgccacctgtaggtaatgacattttcctggatgatcaaaactccaagcaacacattcgcaagcaactggatctggctgctcagcgtgcgatcgacaaggatatctgtgttgtcattggtcatgtcggtcattcggggatgaacacatccgcagtaattcgtgaatccgtctcccgtctgcaaaatcaggtccaatttgtagggattggtgatctggttcgagatgtgtggcaatggcagtctgctcctacactaccgacagataataaataatgccattggcaatggactgggcgattcgtttttgctcagcggggtcattcattctggctcgatctgccgcattgctcaaaaatccggtttctacgatgacggcaggttgcttcacgtaattcaatatataaaagggcttgccccatacaaccccgtgctccgtttcgtacaacttgttcatggcatcctgaatggattgggccagcaaataactcctgccttctttctggtgcagtaccaccgggccgtgtgctgtcgatcggggactccagttcgcatgaatgctgaccacgatatctgtacttacttcttcgctaaggcttttacgttgggcaagatctctggtatgacgggagcggctgttcagccagcggttctcatcactaagtgcataatcaccaagtcgattgatgataacggcataacctttgctgcgaagcaggagatagaccttttggctaatggccaggttgatatctttttccagcacaccttgggctgacgtaccaccgtcaatacccccatggcctacgtcgagcaggataacgggtgctgcaaaggcatgatgacttgagcgataagcatctccatcggtcactggcagcatggatggactgttctgggacggggctgcttttccatgcgcgacatggtggggcaggatgggaagacaatggaagctaatgagcaaggccaccgaagcggtcagcagcttatacatgggaatacacactccttcatgaaataggtaccggatgcagattaaagactgtatggatacctttggcattagactgtgcattttgagggttttcatactcctttcaataaaaaaatgtttaaccattgcacatcctgcacacaatagaactatcgtaagctccgtgaaagtgcaggagcgaaggaggcagaggttatggccaaaagtgatgagttggtaaaatacattacgcaacgtgtagtacattatatcgatacgccgaaggatgagcggaaaggtcgcaccaaaaggaaagagccgtgggcgatgaagtggtttggtatgatccctttcgctgtatccctgtgggtggggaaaaaggaaaaagaattcgatacacagtctcataaacgaagttcttcgggcaaagggtgactatcgcttacctatttcactaatagtaaaccaaaagacgcaatcccttaataaaatgggaaggcgtcttatttgttgttttacaaattatctgactgtgtcttaagaatttgctgatgatcaaggatttacgaggtaaaaatggccatcttgctgcaatgtgctcaaagggacaaagcgttgaatggatgattttccacctagcgctacatatagaatggactctgcttcctgatctgcatgccatagctgataaccgctaacgggtagaggaccaccgtatacggcgttacgatcacccgctgagaaaacaatctcttgattctccccgtgttgtatcacatcttgtgcccggtcggcagcaacaggtttggaggtaagccacaacagattgtcagccggattgaagacgggtcggagatgaagtgggtcgactgataaagatggcgttgtggatgaatcagttatgctgacagaggtctgtttggaatcagcctccagcagcttcaggaactctgatggtagtacatctccgttcgtagcatcaatataaagtgcaggatggttaggctgttccactttccaataagccagtaggggaagagcataaccaagatgaagctctcctccgccagcaagtaatgcctcaagattcacatgttgtcgatctaaggtttgtccaagaagttcattgttgtatggtgactgctctccatgaccatattcactaagcatcaactgaccctgctctgtggccgtaataatcatatatccgataggtttgccttcaaactcagcctgtacgagccagctatgtaaacccggccccagagggtagaagttcaggtcggcgttcttccaatgcacttcaccgttagctgtaccaagtgtaacagcttgttgctctgcaaaccgttgtacagcagcgggagctagcttttcattctgaatggcatgatgttcggggctatactctgttgatgatgcgggggatagcgaagaggttttttgttcctctgcattggctatcgaccaaaaagagaatagggcaagacaactgagcaagcccaaggttatacaggttgttttccgagcgttgttccaacacgtatgaaagaatcgtttcaaatttacacctactttttcatttatccgttacctgagcgggtcctagtttcattctaggggacaggctatgcaaaggttgccgcaacctgtcgggcggctgatcatgaataaacactacttttgccagcatttgcaggaaaagtagtgtcttcgtctatcttaagtgaaacatgccgctgctaatggcagtcactttcactttgggttcatattgccagatcatctcggtccggcgtgtctcatactgcagtttcatagcttcgcgatcgattaccgcctgttttgctttctcttcttcggcatctgtctcggagtcgatcggtactgctgcctctgccgccagttctacatctgctccaatgggtttagcgttagttatatccacaacttttatcagtggtacaggtggcgtgcggttagaagggacattttccgtgtctgaggttatgttacctggtgattctacttcaggcatatcttctcggagtaccgcctcatagtaggtgtccaacacgtcgagctccagatcaagccgctcttgggctttctctgcccagctgtaatcgagttccagcaagcggttcgtcaaatgagattccagagcagctccggcatcaaataacgaaactttagctgtctgtacatgcatgttctccgcaagcctcggactaagatctcgtcggttcagcttggtgccgaatttttctataatttcacccgagcgaagggaaatgccgagaaaatgcaattcctcccgtttcaaatcacaggcgaattccaccttgaaacagacaccaagccaaggctcatatacggctggcgctgtagcccgcaattgccgtttggcagcctgttcgaacaggttcacgaaggcaccgccttcacgggcagcgccgaaaatctgctgcagtctgcgactgccatacaccacttcttcacgcaatattcgtcctggccccagctgtggcaacgatggcgtaataccgaagtaacggcctaaaatagtttcttttggtggctcgccttgaggactgccgttggttacgccattcgttccatcagggttaggaacagcaggaggtgatgcttgcgcagctttggcttctgctgcttcaatggcctgctgataactgtcaggatcaaatataaatgtaaaggacatcgtctcagcgggtgctccggttcgttccacgaacccccaataataggggcgattggtcaacgctttgtccgcctcaggcgagagtttgactgtaacatgggcaggggaacgctccataatctgacaatccagtgcttccagataggtgagaacataagcctgcacttcatggggagacatggtcatgagttagctacctcctttacgaagatctaacaacccggatacggcaggcccttcatctgaaacctcacgttgaatagagttcaacgattgtccaagtgaatccatttttcggcgaatatcttcatcagtttgtgattccagcatgattttgtacaaacttttctcaatagactccttcttctctaaccgttccagaatgacatccagcccgccgatcaccatctcaaacatattgatcttctcatgcagcagattcagaatatgttcctcaatggttccagtcgtggataaattgaagatgttcacgtcattttgctgtcccagccggtgtacccgaccgattcgctgctctacccgcatagggttccaaggcagatcaaagttgatcatatgatggcaaaattgcaaattgatgccctcaccacccgcttcggttgcaatcatggcctgtacacgcccgcggaagagatccatcatccagtcttttttgcctcgattcataccaccccgatagggtacagccgtaagcccattgttgcggaaatagtttagcagatactcctgcgtggcccggtattcggtgaagataattactttttcattcatgttccgaaccagttccatcgttttctccgctttggtattctccttgatcgctttaatatgggcaacgagttcccaaatcttgtcccgaaggggagagtccagcggaagtttcttcgacagattaaccagcgtcacgaatacagcatcccgactgctgcacacttcacgctgcaatgtaacaagggagagcatgctgctcaggttgccgccagcttcctggtactggtctttaacaaaggaagtcacgccatcataaagcgcttgttcttcgggcgatagttgcagattcacgttggagacattccgtttggtaaattgaacagggccttcgccgcggcggttacgaatcatgactttggataactcgttcttaagctgttcctgatttttcggaacccgtttgtctacaacaaagttggccgcaaagtcaccctgacgacccagttgaccgggcttcagcaggttgatcagattgaacaattcactcatatcgttctgcacaggtgtagctgtgagcagcagacaatactttttgcgcaatttgagcatgaattgatagttggttgttttcttgtttttgagtttatgagcctcgtcaataataatcatgtcgtagtcggtattcagcagcatatctttatgcgggtcacgtttggctgtatccatggaagcaacaaccacttcattctgccaggaataggcctttttctgggcaatagcagggatgccaaattttgaattcaactcccgtacccattgcagtacaagagaggcaggcacgagaatgagtaccttggatacgagaccccgaaccatatattctttcagaatgagaccggcttcaatggttttgccaagacccacctcatcggcgagaatggcccggcctgacatttcaaataatactctgcgtgcagtgtccatctggtgagggagtggagtgagaccttgtagatgcttgagacattggatctcgtcaaaattgggaatcaggttggtctcttcggcttgaatgccgagttggaagagtcgataatccccccaaggacctcctttatccagtcgtgattccaattgattaatccaggtccgatcaaattccaacggaacgggtagctcggctacaggttgattcatgtggtgcgggtttttccggttcatggtgtttcctcccctgccatacgtgatgacgttttattcgtaggtaatagtatggacgaatgagagtcagttcataactatataagttgaactacattttatttgcacgaacactacgatgacagaacaaccttccaatcgctgttatccccagatttctttgattcccttttctggagggggaaatccggggataaaggcgaacgcttcgctttttcaggttttttctgtcctctccgttgacgtgcaaatgattagtttaacttatattgaacccagaaatttagtaaaggcacatgttttttctgtgccaaaaaattcactgatgtcgtattcatgcgtatgagggtgtgtgaagaagtttgtccgaacaggggagtctacaaaataaggtctgtgataaaagtcatatgtaaaatcaatatatggtgtaatatactggttttatatcactatatgtggtgtttcatcataatttacttttatagtgaaaatggagatttattccggggaggttgaatgtagcgatgaaatcgaaccaacgatcgtaccgattagaaggacttagcgaaaaaatatttctggaccgatacgcctggaaggacgctgattcgaatcatgccaaggtcggagatgtggtattgatattaacgaaggatgatccgaagttcccaaccaaggaagtgggcgaaatcatagaacgtaagggtcagcttgtacaggtaaggactcgaagcggagagatgatcgagacaagtgtggagaaattgacactcaacatagagaaaacaccggaagagatgtgggaccgtcttgccaaagcgatggcttctgtcgaatccacagccgataagcgggcaacgtgggagtccaagttccgctctgtgttggaagattggaagttagtacccggaggccgcattgctgcgggcgcgggggcaagcgatgagctgacacttttcaattgttatgtcattccgtctccgcaagacagtcggggtggcatcatgaagactttgaccgagatgacggaaattatggcacgtgggggaggcgtaggtattaatttgtcctctttgcgtcctcgccgagcggtggtgaaaggtgtcaacggatcatccagcggttcagtatcgtggggcggattgttcagttatacgactggactgattgaacagggcggaagccgccggggtgcgctcatgctgatgatgaatgactggcatccggatgtgcttgattttattactgttaaacaagcgatggggcaggtgaccaatgccaatctgtctgtatgtgtgagcaacgcatttatggaggctgtcaagcaggacggagattgggatttggttttccccgatacaaacgatccagactacgacaccgagtggaacggggatatgcagcaatggaaagccgcgggtcattcggtggtgcactatcgtacactgaaggctcgcgaaatctggcataccattattgaatcagcctggaaatcggcagagcctggtgtggtattcatggagtactataaccagatgtccaacagctggtacttcaatccgattatctgtactaatccgtgcggggaacaaggcctgcctggctggggtgtatgtaatctgtctgccattaatctgtccaaattctacgatgaaacaaatcatgatgtggcatgggatgaactggcggaaaccactcgtatctcggctagatttttggacaatgtcatcgacgcaacaccatatcattttgaggaaaatagactgaatcagcagcgtgaacgccgggttgggcttggcacgatgggactggcagagctgatgattaagctgcgtattcgatacggcagtcctgaatctcttgcatttctggataaactgtatggattcatggcgaaggaggcctatctggcatcggcagagattgcagcagagaagggagcttttccagctttcgaagctgaaccgtatttacagagtggattcatgaaaaacatggttgcgacgtaccctgaagtgggagaggccatccgtaaacagggcattcgaaatgtcacactgatcacacaagcgccaacgggaagtacaggtacgatggtgggcacatcaacaggtattgagccgtatttcgccttcaagtatttccgtcaaagccgtctaggttatgatgaacagttcgtaccgatcgcacaagattggctggatgaacatcctggtgaagctttaccagactattatgtgacagcgatggatctgtcggctgagaatcacatacgggtgcaggcaacgattcagcaatgggtggatagttcgatctcgaagacggccaactgtccggctgattttacagtggaggatacggctgagctgtacgaactggccttcgaccttggctgcaagggagtaacgatataccgcgacggcagcagggatgtgcaggtgttgtccacgtcgaagaaggaagagacccaaggtgaagatcagaacacggcggaagctgaagagaaggcagtcgtatctgctatagaaaacccaaataatgctgaagtacaggcaagtgatggaacttccaatagccaggttggtgttagaacgcattcttccgatcaagccccttcctcttctacagtgctggataaacaatacagaagccgtcctcaagtactgcgcggtgcgacatacaaaatcaatacgccatttgggatggcttacattacgatcaatgatctggagggaacgccgggtgagatcttcctgaacgtgggcaaagcgggatcggatgtgtttgccatggctgaggcactcggtcgagtatgctctctgttccttcgatacggagaccatgggcacaaggttgaactgttgatcaaacatctcaagggaatcggtggttcgggagcgattggcttcggagccaatagggttgaatcgattgctgatgcagtcgccaaagcattggaaagtcatgtacagagcgatgtgcaggagaacgaaactggagcattacaagaacagagtcgagtggagagcacgtatccaaaagtggaggatcagaaaacctttaccgaatcgagagatttatgtccttcatgcggctcggcatccctgatgaatgtggaaggttgcaaaacatgcagcaactgtgggtacagtaaatgcaattaaatatcttttgaaaaaaagagaaaaagaaaggcactcctgactccattacgaagtcaggaatgcctttttgtcatttaactaactaacaccaatcttggcatcgatctgcaagtgattgcaattcattaaatacaacaccagcatggtagccgtcgcacacggcgtgatgtaactgaacggataagggaagatatactttatcgttctgttgaacatatttccccatcgtgaaaataggcaacaagtaggtaccctcattgtaaatattcagattaaatcccgtaaagttcacccaaggaatactggaaacgggaaaagtatttggcggttcattgggtttggcaacaaattgtttgtgatctttgtaattcttcatatcttccagataacgaatgtggaacgtctcgaaatcttcatggaatgctgtccagatcgttgagaaacttttgttgtcctcatgaaaaattgtataactcggagacatttcgtcccagtagcccaatctcccctcggcgtcaaaacaagttcgaaattccctgtgtgcattgacaaccgtagagatcatgtgaataagagcgggatagaacttcaatcctttaagcttcagttcgttgatcaatagagtgatatccagattagcagttatgttgtaggtacatctgacctgattcaagtagtggtcaaagtatggctttcgatcccactgatctaacacgattgaattaaacataagttataacctcctaaatttgaataatggatttatttaggaggtatatttgactgatttgaccatatcctatcacattcccagtatcgtatttttagaaattgaccatttcagtataccatgatagtgaatatgtcgcttatagctaaatcgtctgcaaaacgctttttcaacctgtttctttcctttataattaaagttgtctttataacgaagaagagaggggattagatgcgtcagccgatagaagaacctatattttattcttatcctggaatggtagcggtggtgacttcacgtcatgagggagtccagaatgtgatggcgtccggatggcatacatacatcgggtcatcaccaggcgtatatggcatctcgcttcgtaaggaaacatactcctatgaactcattgagaagagtggcgtattcggtgttcatttcctaccaggtcatcgatcagagtggattcaagctgcaggaacgttcagtgggagagatacggataaattcacaagattcggcattccgtatgaggaaggaatcaaggtaagtgtacccattttgacagacgcttattttgcttatgaatgcaaggttatggagattacgacatacggtgaccatgaatggattgcaggcgaagtgttgcagcgatatcaggatcagaagtacttcctggagaatggaatggttgatctggagaagttgcaaatcccaatgtacacagggcgttcagcataccggatcatggatgcgaggacagaagaaaagattcacccgttccacctctagggtcctaggcaagaagaagcaattatgagcaaaactttcaatccggtctgacataggtttataatggatattggctgctgagcaagtcggcagccttttgttatgaattcaattgtttcaatcgatgtgtgcgtgggtatgctggtttgcgcaaatgggacaggtaattttagccactcgatgaaaaacactatatttaacgacaaaattagagtatgattttacagctatatgagctggcaggaaaggttacatcggtttaatcgtttgtaactattcctgtaaagtatgaggcttatttcgggcgtataatgctaaacgtgaactcacgaatgaatataaagaatgttttaataatcaaacttaatggactggtcacacgtcttccttaagactatagaattcaccaagaatgtagcatcatcggatcgtgcttcgaacagaagcttttcttatgttgtaaatgaaagatggaaggtgcaatacgtatgttaatgacaaccagaacgatcaggagttcctttatgcccccaacaccgatgttgttgacccacagtaacaaggaggggcatgcatgtcacaatcgttaaatcgtaagagacatatgaacggacttgacggcttgcgagccatcgctgtacttgcggtaatcgcgtatcatctgaatttggattttattccgggcggactgctcggtgtaggtatattctttgttctctcgggatatttaattacagatattctcgtgtcacagtggcaggaacatggacgcatttcactcggtgatttctgggtaagacgggtaaggcgtttgcttccaggcatgctgaccatgacagctgtggtgatgatctggttggcttgtacagatccatcccggcttgctgcgcttcgtggtgatatcgtttcgggtgtattatacataagcaattggtggtatatctttcacaacgtttcctatttcgaaagttttggccctccatcaccgtttggacatttctggtcactggctgtggaagagcaattttatcttatatggcctcttctactgatcgcagcaatcgtagtgttcaaaagaaagggatggctggtcgttttcattgtcgtcgcagctgaattatctgctggcgcaatggccatcatgtataatccggatttggacccgagccgtgtatattatggaacagacacgcgggcattcgcactgcttgctggtgctgctcttgccgtggtgtggcctagtcgcaagctatcgaactctctgtctggcatgaaccagcttgtgctcgatgtgtcgggacttgctgcgctcgctttgttaatctacatgatgctgaacagcagtgaatacgatccgtttctgtatcaagggggcatggtgcttcaggctatcgcaacaacgttgctggtagcggtgttggctcacccatcgtctttactggcacgtatcattggcgcgaagccattacgctggatcggagagcgatcctacggattatatctgtggcattatcctgtcattatgttaaccaatcccgcggtggatacgggaggagcacatcctgtacgaatcattttacaggttgctgtaacggttgtactggcctcattgtcccttaaatatattgaaaatccgattcggtacaatggattccgtgattcttggtcccgattatggggaagagggcggtcatcgatcggtatacgtaacgtatggtggaagcgggcaggtctgttgatgacgattctgctgttgtcctatacggtatctcagatgatggtctcacatgcagcgaactccgactcccattcggtatcgatgtccaacacattaaatggagagaattccgtagcggaggaacagggacaggatgtgttgccagctattacaggaacgtcaggctctggccaaaagaacgatgctcatacccataaaccggaagcaggaacgaaagatgatccggggaaaaatgagaagccaacaggagagcctgctccagactcaaaacctgacgaccaaggcaactcagtgaatcctggcaaggacggtcagtctgaagataagccggctgatgactccgtgacgaacgagaatgatacatcggatgacgccgaagcgaatcaatccgataatacggatcatacggatgatgcacctgattcatctcaggacaatgaagaaacggctcctcctgcccgggatggcaaggtccattataccgtcattggagattcggtgattttggatgcaaaaccgtatctggagcaaagtatatcgggagtgtatgtggacggacatgtcggtcgtcagatgtggcaggcaggcgatgtattggaaggtctgaagcaaaacaaccaaatgggcagcaaagtggtgctggagctcgggacgaatggttcctttaactccaaaaacttgaatgctgtgcttgattatctgaaggatgaggatcgggtatatctggttactgtgcgcgtacctcgtccatgggaacgaacggtgaacagggcgttgaatgaggcagcatccaaatacagcaatgtctcgttgattgactggaacagtgcaagtgagggacatgacgaatattttgaaaaagatggcgtacatctcactacgcaagggtccgaagcttttgcagaactggtgaaaaacagtatccaataatacgcaatccatatttaatacgacttagcactcattcattatatatagcctggggtgaagcagccgacggctgcaacaagaaagagctctcattgtgagggctctttttatatgttatgaacaataagtcagcaaagtaagtttcaaacaggggaaccgatatttttcacccctgcatccgtggatcgtcaccttacggtatgatagcgttaacatttacaataagtgtattcaaatcgccgagggggattatagagatgttgaaaaaatggctttcgggtttcctggcaataacattgttctccattattctggctggctgtgctggcggggacacttcagaaggaggcagtgggaatgacaaagtaaccgtcacactctggcacaactggaccggacaggatgcaaaggcggttgcgatgcgcaaaattattgaagattttcgcacggcgcatccagatattgaagttgtggatgaaggcctgccaacagatggtctcaaaacccggcttcgtacggtggccgctgccaacgagatgccagacctgttcgtgatgtggccggatgccatgactaaggaatttgtcaaaggggatctgctacagcccattaatgcagagctggacgcaaagccggagtggaaagacaactttatcccgaatgcactggatggatacactgtggacgggaatatctactccgtgccgatgaatctggcgccaagttctttcatttattacaatgaagctcttttcaaacagtacaacgtaaaagtacctgagacatgggcggaactggaacaagcgattgctacttttaatcaaaataaagtcattcccatggcacttggcaacaaggccaactgggtagctcaatcaacgatattcagtacactggctgatcggactaccggcacagactggttcctgaaagcggcagcacaagagggtgctagctttaccgatccacaatttattgaagccttgaacaagatgcaggagcttggcaacaccaaagcattccaagatggattcaacagtatcgatgagacacagatgatgcagctttatttccaaggtaaggcagcgatggtcatgaacggcggatgggccttggcaaatctggtgaacaatgcacctgaagaggtgttgaacaacacacatattacgattcttcctccagtggacggaggtcagggtgaaccaagaacaacatccggtgtagtaggaaccgggttgggtgtaagtaaaaagctgagcggtgcacaaaaagaggcagcgatggagctgttctatgcgctggcaggacctgatggtcagaaggccacattggatagcagcacattggtgagttacaagattgatctggacaaaaccaaagcacatccattgttcgtagaattatatgatctgatgcaggaagtgaagatcacgccagtatacgattccaagctgggatcggcaacggttgaggttattaataatgcattacaagagttgctaatgggcggtaaggccgaagacattgcagccaaaattcaggcagctcaagccaatgcagttagtcagtaaccattcgttaaaaccccttcccggcaggggaggggttttaagtatgaatgggacagtcagttgcaagttggtaaaggcatttatggaagggaagtgaacagatgaacgcactgcgcagtcggcgttttattatgctggggctggccccggcagtcatcatttatgcattgtttgtatttgtaccggtcgtgtggtcggcatactacggtttcttcaactggtccggcatcggcgcatccaaatatattggtgtggataattacattgagatctggcatgatcctgtattttggcgggcactgaaaaataacgttatttttgtattggcatcggtgtttggacaaattccgttagcgttgatgttggcggtcatcttacacaaaagtaatccattacagcggtttctgcgctcagccgtatttctgccgatggtgttatccactgtcgttatcggtatgatctggcagtatatctatcatccgcagattgggatattgaactttctgctggacgcactggggcttgaaagttggaagctgcaatggctttccgatgacaagattgccattttctcattggtaccgccgctgctctggagctttgtcgggttgtatctgattatcttcatctcggcgttgcagaatattccaggcgagattcatgatgctgccaaaatagacggtgcttcaggaattcggaaactggtatcggtctctttgcccataatctggggtacggttcaggtagcgatcattctatgtatttcgggtagtctgaaatcatttgatctggtctacatcatgaccaagggtggtccggcacatgcgacggaactgcttgcaacgtatatgtacaattcaacctttacaacataccgatatggttttggtagtgcgatctccacaaccatcgtactgatctccctgctgctgatcggaacaagccagtggctaactagtcgcaaacgaaaagagaatcaatagagaggaggagctatcatgcgcgtgacacctgtatccatgccatcacctcgaagcagctcgggccatccgattcgtcgcttacgtagcggaattgtttggacgctgctaacggtctatggtattttaacattgtatccgttctactggctcgtgattagtgcattcaaaacaaatgaagatttctatagcaggccctttggtctgccggaaaactggaatgttgccaatttcagcaatgcatgggaaagctccaggctagggactgcttttggcaattcactaatcgtatcggtgggttcacttattctgacgctgtttattgcagcgctggcttcattcatcctggctcgtttccagtttcgctggaaagggttgatcatgaccttctttgttgttggtatgctcattccgatccatagtacgcttgtccccttatttattctaatgaaacagatgtccttgctaaatacgtactgggccttaatattaccttatacggcttttgcattgcctacggccatttttgtgcttacggcttatctgacaagtgttccacgtgatattgaagaggcagctttcattgatggaacaggactttgggggctgtttacccggatcatgttacccatgtccgtacctgcgttgtcaacggttacgatcctgagtttcctgcatgcgtggaatgacttttcatttgcgcttgtattcatcaacaaaaccggattgaaaacgttaccgctggccattgcgaactttgcggatgggtatcaaaccgattacggcttaacgcttgctgccatgaccctatcggtcattccaaccattatcttgtatctcatattccaggaacaggttatgaaaggcatgacagctggagctgtcaaaggataagcgaaagcgcatccagaggaggagaaacgtttggcacgctggctcacatcttcgttacaaaggaagctatcggtcgtcgtgacggcttcaatgattgtgccattgctggtgttgggtctgttcgcctttctgatctcttcccgcattacagagcaaaaaacaaaactgtctggcatggatacgctgaaacaggtggaagcaaatcttcgttatatgctgcaagatgccgagaacctatcgatttttctgattggagaacgggacatccagcagtatcttagccacaatgaagatcatgagctggaccgggtggatatcctgggcaggatgaccaatctggcggcttccaagaaatatatcgccaacatcgccatatatccgggacgttttgatgccacattgtcaaccgctacctggtatgaatccaatgaatccaatctttcgtatccctctgttccaagcggtgaagcagtcaaacaatggacgggggtatacccggtgcagaattacgcgggtattcaaaatgtgatcacattggttcggccaatccgtagtatccatgattatcgacccatcggctggttagccattagtctggatgagaaggccatatccaagggatgggccgctctgggattaggcagagggcaaggcagactggagctcatcggcagttctggagagattctgtcttcgatggacaaatcccggcttggacttaagctggaaggtgtcgaaccagggatttcgacgttaattcaggatggcggtagcggaaccaccacgtatggcagtggtgacgataaacggacgttgctctattatccggaagaattgacggggtggacgttggttggaacagtcccttacgaccagtacaagtccgagaatcggtacattcttattctaacaggttgcgccgttgccatgtctgctgcgataagtgctgccttggtctggtttacggtgcggcgtgtgacgaggccgcttcgtgtgcttaccagacatctgtcccgaattgatccggagcgtcctcttccgctgttccggtctgaaagtgatgacgagattggcaggcttggggagagttacaatctgctcggtgcacatattcagttattaaaggaagagattattcgaggtgaagctcgcaaaaaagaggcagatcttcgagtgcttcaggcacagattaacccgcactttctgtataacacactctcttcgattcactggattgccttaatgtctgaagagaagagaattgcggatatggttgagggcctgagtgattttctacgtatcagcttgaataatggtcaggattactgccctgtggaacaggagattgctcatattcgccattatgtgcgtgtgcagtcgattcgtttccctgatcaatttgtgttgcattatatcgtagatccagcgcttgagaagcaaatgatgctgaagctattgctgcaaccgcttgttgagaacgctatgattcatggcattcagcccaaagtaggtatgggtaccatcaccataatgattcgcaaggacccggataatgaacagatgaatgtgctggtgctggatgatggtgtcggcatggagccagacatgctggaacaattaaggataagcattagggaatggaagggaaaacagccggaaaaacagttaaaccaaggcggttatgggctctgcaatgtaaatgagagactgctgctccattatggagcggatgcacagcttgaagtagacagcagggttgggggaggtacccggatttcgttttccattccaatcttggagggttcgccatgagattattaattgttgatgacgaagtcattatccgtacagggcttgccagcgttatcgcgtggcatgaactcggaatagagcttcttcaacctgctgcctcggcagaggaggcgttaacacgcatggctgaggaacgtccgcatatcctgatgacggatattcggatgacaggcagatcggggctggaactggcagaagagggactacgattgttacctgagctggaggtcattattttgtctggatacgatgacttttcttatgcccaacaggccattcgccaaggcgttacagattatctgctcaaaacaagcaaaccggaagagatcatcaaaaccgtattacaggccaaacagcgaatcacggaacgttgggcagagaagtccagagagggacagcttatgcgggagaatcgggagcggttatttgccgggtggatcattgatggtgacaccgcttcgggccattttccttcattcttgcgatctgatgctggaaaagaggtaggggttgttggccttgatgatgaacagattttcagacaagtcattattgttcgagcagagggttgggatcgatcctcggatgcgctattacgatttgcggtgcagaataccctggaggatatgttaccgggtgccattgctcatgtagagaaacagcaaattatctgtgtagtttcatggccgtctgtggaacatgaaactacattcaggctggagagtgcattacgtcgggtggagcaattactgaagtgcaccctgcgcgtagcggtgggtctgcctgtgcgtggatatgcagatctgcacgaaagctacattactgcctcagctgcattccgatatcggggtttgatggattataaagtatggcattatgagcacgttcaggatcgccaaggtggtaaaactgtacttacgcacgaagaggagaccagacttggtacaatattgctggataatgattcagtcacgttaacgacatggacgcgggaacttgtggctaatctgattacagaaccggagatcacaccagaatcgttcagtgcttgtctacactcggccgttattgcaggtcatcgctggctgactcgcacaatgcgagccacagggcgtgaagaacccgcaaggctcgagccctggttgccggaaccggatgccgaagctgtggagctcggggatatgctgttccatcatctgtatggtctgatgcatgtctatcatagccgaatgggccagggacaggctgctcatgtgcagaaagctatcggttatattgaatcatcattggcgcaggatattaatctgcagcaggtagctggacatgttcatttgcatccgggtcacctcagtgaactgtttaaaaaagaaatgggtgtgaccttcggagattttgtcaccgatatgcgtatacgaagagcgatggatatgctcgcggtgtctccagcgaaggtcagtgaagtcgctgcaatcagcggctacgaggacgtgaaatattttagcagactgttcaaaaaacatacgggcaagaccccaagtgagtatcgcgaagaggcgttgttgttcaagccttcgggaagatagaaatgagcaaattaggaaacatgttttacctttctgcaaacgttttcgatatggtattactcagggttattggagagtgagggcatacggatgaagacctatagttcaagtcaggatttatcgggacaatggaagatacagcattttgaagttggagagaagcgggcaatggatgtggcagcagctgcactggatgaccgtttctggatcggggctgaagtgcctggcgatgtacatgctgcattggttgagcgcagtatcattgatccgccctattacggacataatgatgccaaaagtcgctggattgagcaaaaggaatggtggtatcgcacaaccttcaatctggtgagagatgcagagacggaggagcactttgaattggtgttcgaaggattggatacgtttgcaacgatatatgtcaacggccatgaagtcgggaaaacggccaatatgcttatgtcacatgcatttgatgtaacgtctctggtacgcagcggttggaatgcgattgctgtcaagtttgatccgcttcacctgcatcaccgggacaaagaaacctttgactggtcctcgtatacgaaggaacggccatggttgcgtaaagcagcgatgaattttggctgggactggggtccacgcatggttacggtggggatctggggtgcggtaaggctggaaaaacgaacaatcgccaagctggaaagtgtatatgctcgtacggaatcagtcagttcagagttggcagtcttacatgtcacagcggatgtgaagtcggtcttgtcttaccgtagcagacagaaacgtgagcaggctgtggttgcgacctgtaatgttcgtctgttggatcgcagcggacacgaggtggcagctgccattgaactacccgcagtgggaggcaaagcagataccacattaaacgtaacgtcacctcagttatggtggactcatgatctgggtgagccgtatctgtatatgctggaggttacattattcgcagatggcgttgaggtggatcgttatagcgagccttatgggttacgaacgattgagctggctcttcacaatgaacggggtgaagatgcgtttgcttttatcctgaacggagtcaagatctacgccaagggggccaactggattccggctgatcatctgattggcgccatcccgaactctcgatatcgagagcttgtcgagctgtcggtggaagggcatatgaacatgttgcgtgtctgggctggtggtatatatgagaaggatgtcttctacgatgagtgtgatcggcaaggagtgttggtgtggcaggattttgcattcgcgaatgcactgttcccggatttcaatcgtgatttcatggataatgtacggcaagaggtagaaaacaatgtcttacgtctgcgtaaccgtgcctcgcttgccctctggtgtgggaataatgaaatagattggctctatgatatgaagtctgcaagtggagatattaccagcccgttctacggtgaacagatctatcatgagctaatccctgaagtgctagagcgattggatctgtctcgtccgtactggccttcttcgccgttcggagacagcaacggtcaggatgcgaatgacccggatgtgggggatcgccacaactggcaggtatggcatggttcggtctatccaaggaagcatggagagccaccactgctggactacagtattgaaggtgtaacgttcaaaaattacaaaaacgaccatgcattgttcagtagtgaatttggtatgcacgcctcggccaatcgttacacactggagaaaaatatgcccgcaggtcagttttactggggcagtccggagatggcctatcgtaacaaagataccaaccaccagaaaggtattctgctaatggagggttacacagggattccgcaagatatagaagagtatatgaactactccatgcttactcaagcagaagggctgcgatatggaattgaacatttccggcgcatcaatcaccgtaacagcggtgcgcttgtatggcaattgaatgatagttggccaggaacaagctggtccatgatcgattatgaactgctgccgaaggcatccttttattatgggaaaatattctttcatcctgttctgttgtcactggagcatgagccaggtgaaccgcttgcgttgtgggttgtgaacgatacacgtgacgtcttgaaaggggagcttcgactcaatgtctatgcattgaatggagagaagatctactccagctcacatgctgttgaggtaacatcccaatcctcacggtgtattgctgaattaactgaagtacaggtgttacagggtagacgcgcggaggaagtaatggttgagttggtatccgaaggatttgcggcaccgagtaatcgatacttcttgagtgatcctaaggatgtgaagttgccagagtcgcaattgagcgtgcatgtgaacgaggaggagcagtctgttacggttacggccagtggtgcgattgcacgattggtgaagctggagcttccccttgggcgtgtccgattcagtgacaattatttcgatctgctccccggtgagagccgaacagtgagactacgtcatccagagcaaacgtctctgcctctgacggaacttcgagttagtgccatgaacggcagagaaggataaaataataatcacagacttcgaatctattcgaggttcaaggtggtaatcctgagcagggatgccaccttttttacttttgcagcagggtgagttcctgtcgttgtgtcaggtggtttagtccttattccacaagcgaaacttccaatcgggttcacatcttgaatcattaaggttagaatgatatagagaaatcgttttcaaaggaggtggattcatgtcatttgtcttttatccggagatggttatattcattctgatgttgatcctgctgattattggtattgtatatatcgtacgtaaaagcaaacaagtattgcgccgcttaagcaatctggagaaagcagtatatgaaaaagataacatctcatcctatccgaaggacgtggatactgtacaagaagcacccagagaagacacgtttgctccacgcaaacgaaaatgaagaaggatacggaattacataaaaaagataaaccaacaaaccaaagagccgattcttctctatgaggaagtgatcggctgtttgggcatatagacattttactcgtatttactgggtttagagaaaggattcataccgctgttggaaagaggattccatctccacttgtcgtgcaagttgctgctgtacctttgcaccgcgaatcgtctgaagttcctgaagttgtgcagtggaactgaattgatctgcagccatttggacaagtaattcggagagcacatccgcatcttcgagcgcggcattaagtccaaacgcaccggttggtgtcatggtatgagcggcatcaccgatgagtacaacattgtcctgtgcccacgacgggcaatagctgctttcgacagataacagaacaaaatcactccagctctgaatgttggcagctactgaatcagacaggcaaggaaaagcagatacaagtttatctacaaaaggcgcaatcggctgctctcgcagcttggagtatgctccctcgggaatgttccatccaatctgaacataaccgccgaactgtgagaatagtgcgagctgttgaccatccatgctggccatccgaacagcgggttcccaacctacgggtgccggaatgcgtgcccagagcagatcatacccatgcttacgaatctccggggtcataccggaatgtttgcgtacagcagagtatctgccatcagcacccacaattacagatgcttcaatggaggcaggaacacccttctgccgaatgttaatacccacgacctggccgttcttgtctcgtaacaaaccggtcataatggtattaaacagtacttgttcattggagttgtgctgctgagcgtgcgacacgatggcttccaggagatgatcttgaggtacatgaataccaacatgagattctccattgcctggtgataccgtatgaataatctgcccattttcccaatactggatctgttccaagagcagcgctccgcgttcctgaatgagggaatagaggccgtgtttattcaaaatggcttcgccgtccacattgagcaactccccgcgaaacgacttgtgcaggtggggctgccgctcaatgagcatcgtggagattccattttgattcagtaaataagaaagcaaagcaccgccaggtccagcaccgacgatacaaacatctgttttgagttgagattgtatattctgattcatgtgcataagtcccttacattataatgatgacgcttcatttactttataacaacagatttattaaaatcattaagtaactaaaagtaactttaaagatataggttattataaacaaacccgttgccataatgcaataggtgaaaccggaaataaaacaagagtcttgcagtcaacgatagggtgtcggatacaagcgcatttttcacaaacatcatagtgtaaatatgttacaatataaggtaggttatgatgaaaggcaggaggaacgtttatgagcccggatacggagcgaaactctcaattggcaaatgtagatcaattgttggaggccttcttcagatataaaaataaagtattggatcagcagcagaagaccgaaaccaactgtaaactgaatccgacaaaaagtcatatattgggcatgattttacgtgaaaaaaaatgtatggcggttgatgtggccagacaactcagtttgtcttccggcgcaaccaccattgtactgaatcaactggagacggaagggttgatccagcgggtacgcagtgaagaagatcggagaattgtgtggctgtccttaacggatgaaggcgcgcagcttgccaagacacttaatgcgaatcgcggccgaatgacgtgggaattgttgcaagcactttccgaagaggagcaacagcagatgtttggcatgctgaagaaaattgaactgaaactgctggagaacatgaagtcgtttgagcagattcaccggtagtccatatatgacttgatccttgaagacgtcagtcctcatgagttcgtccctaattgcggggggatgaatcttgaagactggcgtttttgagctgatctacaaatgaaagcgaaccacatgatccgttaagccttcctggatcaaaacttctttttgtttgctgcccatcaggtcaaagtggggaaatggctgccgccgatgaatgtatcgcgggtccagcccatgatcgttgcaccaacgctcgagacgttccagatctgcgcagcccactttggtgacactggtgataccggggaatcggttgtcaatccagaaatgagtgaggtacgcaatctcaccccgagccacttgttccttccacgcagcaagctcttgtcgtttaattccaaatgccatagatgcaagttcctttccaaacgggtattgtcctgagcatattgtaacatcttatatacagaatccatcagaaatctttcattcagactggtctgaggcgagttgattgggtatatgaatatgacaacatttttataataaaggttggattatgttaaaataaacctatacaacaaaggtttcaccacttctatagcggaaagggattgtcatcatggaaatatttattgccgtacttgtgttactggtactgattggtttatccaatatcttaaaccggtttgtaccctttattcccattccgctcattcaaatcgtgcttggtgtagctatagctttgcttcccgcaggtgttcacctgccgttgaatccggaattgttctttgtactgttcatcgctcctttgttatacaacgatggtaagcgaacgccaaggaatgaattatggaatctgcgtgcaccgatacttctgcttgcactagggcttgtattcgtgacagtagtcgtggcgggatatgccattcactggctgattccttcgattccgttacctgctgcttttgctcttgcagccatactgtccccgacagatgctgtggccgttggcgccatggcgggccgggtacatttgcctaaaggcatacataggcttcttgagggtgaagcattaatgaatgatgcatctggcctcgtagccttcaaattcgcgattgcagccacagttacaggtgtattttccctggcgaatgcaaccttcagttttattctgattgcgattggcggacttcttgtcggggcattgttatcttttctgttaatcaggctaggggtatggatccgtagattgggcatggaagatgtgaccattcacatgctgctgcaaatcctgacgccatttatcatctatctggtgagtgaagaaattggggtatcaggtattcttgcggtagtggcaggcggtattatccacgccattgagcgtgaccgcgctgaatcggttcagttgaaaatgcaggtggtatctgcgagcacatggtcagtcattttatttatactaaatggtctggtgtttgttattttgggtgtacaggtaccggatgtgctgagtaccatctttgaaaatgtttcgtttaataatctgcaggtgttgggatatgtgggcttgatctcggtgctactgctggttctgcgttttctctggatctatctgttctggcaagggaatgaattgctgcgtaccaaatcctctattggcaggcccagattcaaggatattacgatcatttccctctctggagtgcggggggctgtaacattggcgggtgcgttctccattccttatgtgcttcaggatggatcacctttccctgaacgggatctgattattttcctcgcggcaggagttatcctcttctccctgattgcggcgagcgtgtttcttccagttctggccaaggacgatgggaaatccacagaagaaacaccgcagaagtcagaacgaaaagcacatgacattatgctgaatgcggcaatacgagctgtcaaatccgaaatgaacgatgagaacaaagctgcggcactcgcggttgtctccgacttgtccaagtacatcagacaggccgcaggtcagcttaccgccgataaacgcaaagatattcagaaacaagaaacggctattaacctgattgccacccgggcggagcgtaaagaagttgaagtaatgttagacgaaaatgcaattgcttctgatgcggccttcaaatgtgacagctggctggatcgcaaggaaatgatgctggcgaatcgtgcaaacactcagttcatgacttcgatcagcgagatcggtcgtgtgttaggacatctcttcaccaaccggtcccagaagccgaatcaaccatttatgcttgaaaatgcagaactgttccgtcaggtgaagctgcgcacctctgaagcggcaattaaggctattcgtgcccatatgaacgatgggaatcgagtagtcgcactgtcggtcattgccaagtatgagcgtgtaattgcgaaattgcggacctggaaccagggtaaaacggaagatccatttaatcaggagaaattggagttgcagatggtggcgattcaagaacagcgtaatacagtgcaacaactgtatgaaaacggcgaaatcacccgtgatgtggctgcaaaactgcgccggtttattaacgacgtggaagcaactgcgctgaaaaacacctaatccgataaatccgatattttaaatatgctaaatggtttgatataatatgggacaagaaagacgttacaactaaattatacttattcgatcagtgaaggagagatgagacatggcagaacaacaaattcggttgggcaagacggatctgatcgtgaatcccattggactgggtgcgaatgcagtaggcggacataatatctatccggacatgctgaatgatgagacgggtaaggaagtggttcgtacagctttgaaacaaggtattaactttctggatacggcatacatctatggaccggagcattccgaacgactgattggtgaagtactgaaggaaactggtcagcggcagaataccatcattgcaaccaaggcagctcataaatttgtggatggcaagattgtcatagataactcacctgcttttctgaaaacagccgtggatgaggcgttgaaacgtctgcaaaccgattacattgatctgttctacatccacttcccggatgaacatacacctaaggatgaagcggtagatacgttaaaacaattaaaagacgctggcaaaattcgtgccattggcgtatctaatttctccattgatcagttgcgtgaagccaacaaggacgggcatgtagacgtactgcaatctgaatataatctgttcaaaagagatgcggagaaagagctgttgccgtatacgactgagcataatatttcttttgttccttacttccctctggcagcgggactgctgggcgggaaatataatcgtgatacaacctttcaggatggacgggcaaagaacccgctgtttacaggtgaagctttcattgaaaatctcgataaagttgagcaactgcgcagcatagcacaatccaaggatgttgaggtcgctcatctggttctggcctggtacctgactcagccttctattgatgcattgattccgggtgccaagcgaccggagcaggtcattaacaatctgcaaacattaaatgtggaattgactgctgaggaaattgcagtcgtggatcagatctttcgttaatgagttcgggtgaatcgggaaatgctaacagggagtttacgtatgaagacaaagtgaggacaccacatgaacctgaaggcagcccgagtcatcggaatgttcacgctaattattttgctgggtagcagttctgcctatgcaaagcctgtacagaagaaccgtcagtattatgaggaacgaggagaaatcgtgtgggaggttcccacgcaggataaactcatcgcccttacctttgatgatggaccagatccgattcagactccgcagattctggctttgttacagcagtatcatgctaaaggaactttttttgtacttggcaaatgggcagataaatttcctaaactgattaagcaggaacagctcgaagggcatgaaatcgccaaccatacgtatgcgcacacgtatgcagttcgatcaacacgtgcggacaagtacatgaaggatatgaacgaagcagaaagttccattattaaagctggcgcggagcgtcccctgttattcagaccaccgggcggctactacaatgacatggtcatccaggctgccaaacaaaaagggtataccattgtactctggtcttggcatcaggatacacgggactgggcttctccaggtgtatcggctatcgttaacaaagtgttgaagaacgcacgtaatggggatattgtactttttcacgataaggtggaaggcaagtcgcatacggtagcagcactcaaaacgatcctgccgaagttacagcagcaggggtaccaattcgttacggtgtctgagctacttgctgtaaaggcacgcgaagccgcgaaggatggaacttcgccttcatcaattttgaagcatatgcagccctgaacatggctaatccaattagaaaccgaaggtctcagatgaagagaccttcggtttctttatcttggtcttcatatcaaccatggaaccagccttaggaggttattgccgtgtcccttttgttttgaaaccaaaacgtctacaatagatggagctttgtgtttaagggttatatagtatacaagatatgaattacgacatagaggagagtgaacataatgaatggacaacaacgtgtaaatattaagccaggtctggaagtggacattgtgctgaagcaggatcaagctacaggtaagctgacacggggcattgttaaggatctgttaaccaaatcacctacgcatccacacggaatcaaagtacgactgacgagtggtcatgtgggacgtgtgaaacaggtcattacaggaggctcgaactaactgtggcccaagacggggagatgagtaataccgcagaagtaatggcacatctggcttcgggtaatacacgtcagcaggacgcctattatgtgttaaagagctgtggattgctcgaaatattagctgactatcacccgtatccagcaggaacggtgccaattgatattgatattccgggcagtgatctggatctgctgtgttatgcagaggatctggatgtgtttgaagccgagatacacaatcgaatcggagccgttgttgagtttcaatgtgtacgtggtggggatcttccagaccaacgtccttatgtgacttgtaatttgcaagtgggacattggcctgtggagatttttgcccaatccgttccagtttacaggcagaatgcatacctacatatgatcgtagagtggagattgttgcaactgtggggagacgcgggacaccgtgagatccgcagactgaaacaggcagggtggaagacggagcctgcatttgcttctgtacttggactacagggagatccatatgtggacatgctgcatctggcagagatgaaacgtgaagatctctggaactgggcgcgttcacgcacgtctttttaaaatgtctatttgagatgaactaatcatttacacgataacggagaggacagaaaaaacctgaaaaagcgaagcggtcgcctttattaccggatttccccttgagaaaggggatcaaaaaaatctgggaataacagcgattggaaggtgcttctgtcatcgtagtgtcagtgtaaataacctttggtcagatcagaaagatggctacaattgttgttaccgtgagtcccagcagtacaggcttcaggttgcgtcttgcaagttcaaaaggattgactccgcagattgcagcagcaggaatcaatgcccatggaatcaaggttccaccacctacccatatagctgcaacctgacctaatgctgtcagtacaggtgcggaatctgctgaacctgcaaacatggacgcaatcgagccaaccagggatatccccgagaaccccgaaccatccattccggtcacggctccggttaccgtcattgtaatcgcgcccaccgtatcatttaatggcaccagcccagcaagtgcgaccccgagatcattcacaatcccgtgtgaaccttcaggaagagggttgatgaacaactccgtaattgcagcatctcccagataaaaaaatgcggctatgggaataaccggtccaaacaccttgaaaccaaactgaaatccttctattaaataattggtcgtttcctctggtcccgcatgtcggtgtgcggcaagggtaacggcgatcagtataaccacagcggttccgccaatcagagctgttgcatcgccgccttgcaatttcaatacaaacatcagaatcacatcaactgcgaataacagagggataagcagagcgaatgctttttgcaaacggagtgacatggcttgacgttcaacaggctgatcagtgggtagggaggtggacacagcctctgatgaagaagaaggttccgtgctcacggtacctgatatagcgtttggggaatgaacaggtgaacctgatttcatctctttgcgcagcatccagaaggctgtaagtgtagatacggtgcccatgacaatgaccaaaggaatgctggccgtcatgacggaagtgaccggtatacccgccgcatcggctgtaagtttgggagccccctgaataatgtaatctcccgacagtgcaatcccatgtccaaacaggttcatagcaatagcagctccaatcggaggaagacctacacgcacggctacaggaagcagtactgcaccaacgagtgctacggccggggatggccagaaaaatagcgatactaccatcataatcaatccgataccccaatacgcgacctgaggagaacggataaaccgggtgacaggtgttaccatgacctcattaatgccggttctgattagaacacggctcatcgccacaataatcgagatgataaagatcgtactcagcaattcttttgttgcatagataaaactgctgaagatcccggcaactgacccgcttaaggtttcggttgccagaagtccaatggtcataatacccgcgacacagatgatggtagtatccctgcgccggatcattaccgcaataatcaagacgataaatgccagatagacatagtgtaacgcagtgagttgaatattcatcgaacaggcctccctacatcctggtgactaacccgaggagtgatatatcgtatgcatgtcaagatcgggcgttcgtggagtccggggcttgccgcagcatttatttttagggagaagcttctgagtaataatgaaggattttttttacaactggagaatttattactacatgaagcttgttactcttgaaattggtgcggatggaagtcaccagaattgatatgtgaaggtcacgggaccccatagacaatggcaagcaggggtgattacaataaacatgccatcataaggaagaaaatagaaaaaaactatgttgaaataaagtgtgtgttcaataagtctggtttcagtacagtggactttttgaactacctctaaaagggcgggaatccataatccatgagctttatccgttcacttcgttttaaatttatagtgggtcttacattgatcatgctgccattattcatgctgctttattacaacaacgtctacgccatgaaagttgtacgtgacaaagtatccctcaccaatatgaatcatctcgccaagagtgtggagcagaatgaacgtgtgttacaggagacgaatcggtatttatatagtctgggtgagcgggacccggatattatctctctgttttttctgaaatacggcagcggcgattatatcattgcaaagcaacggattatgaacaaattcatgacagatatcggtttttataatctaatcgattctttttttctatatgatgccgtgaatgatgatctgctgctcgccacttcaggcaattatgatgtcaaaaagtcggttgtgcaggagagtatgccagtccagatgcagcaattggaaggggatatccagaagccggaatggagcatcgtgcgtggcgggacgtggaatgcgctggtgaaaacggtgcgaatcaaccagcagttctatgcaggtgcacttgttgatatgaatgcactgaatcatacacaacaattcactgaatccggagatcggggaggtgcagtcattgttggaacagacggtggggcactatcggattccacattaaatactgcacagattcagctggctgcagcgcatcttcccggcctgaagaatccgtatcaggtgatctctgaagttgtgaacaagggagaagcacgtcaatatttgatgttgggtactgcctcggccatgtcccagatgaattatatcgtgctgctgcctgaggaagacatgatgcgtaacctcccgtttttccagcagatcattcgtctgcttcccattggtgcggcagtaattctggttactgcactgatctttttgcggcatctgttattccgcccgatgaatgcgttaatccgaggcatgagaagggtcagccgtggagatctcgatgtgaagctggacccgccatcttcgtcggagcttgaatttatgacacgaagtttcaatcaaatgaccagtgagatcaggcatctgaagattgatgtgtatgaggaacagttgcggacgcgggaggcagagttcaaacaactgcagatgcagatcaatcctcacttttacctgaattcactcaatattattcatagtctggcttccttgcaaaaacatgagttggtgcagcagatggctggtcatctggccgattattttcgattcagtctgcgtgcaggcaaacgtgttattcgtctggatgaagagctcgagcacattcgtcattacttagaaattcaaaagttgaggtttccaagcagattcgattttgaactggatgttgagccaaatctgggacattatgtgattccgccattaaccattcagccttttgtggagaatgccattattcatggatttcagcgccggacacaagcatttgtcattcggatcgtggcgcgcctcggtgagaagtcatccggtcaggtcgatgggacggtgcttcaactgatgattgtggacaatggtgtcggatttgaagaggaattgttggggcgtctgcaacatggacaatacgctgaagatccgagtggacagcatatcggtatatggaacgtggctcatcggcttttagtgaagtatggtgatcaagccagtttgcagtttggcaatgaggtggatcatggcgccaaagtcatcattgatttacccgctcagaccgaagaggaagaagggggagcctatgcggaacctgttgatcgtggatgatgaagtgtatgcattacaagcgatggtggaaggagtcgattggcaagcagcaggcattgaccaggtatacagtgctggtgatgccgaagaggcaagaaagatcttaaaggctaatgctattgatatcatgatctgtgatatcgagatgcctggtgaaacagggcttgacctgcaaagttgggtgttaaaacatgatccaggtataatgaccattttcctgacagggcatgctttattcgattatgctcagacagccattaagctaaacagctttgattatgtgttgaagccggctccagcggatcaattgattaaggtagtaacccaggcggtggagaagatcaacgatggagagcagcgtacccgtaccaacgaagtttatgagaccgtatacaaacgctggaaaacccataaaccgctactgacggaacgcttctggaaagatgccatctctcagcgtatcacgttaaccgaacaacggttgcaagagctcgcagaactgtatggtgccgagattgatccgcatgctcgtgtgttacctattgtgatctcagtagaggaatgggtgcgtgattttgatttgcgtgacgaagaggtattggaatatgcccttcgtaatgcagccaaagagatgctgcttagcgacaagcccggtgaggtgtttcaggatcaaagtggattaaatattgtgcttgcttatgagcaagatggcatcattccgagtgcgagcgaagtggcacaacgttgtcagggatatattcaggaatgtggtacgtatttctactgtcggttgtcctgttatgttggtgccccggttgctgtgactgagctgcaaggcatgttaaatgaactgatggatatggagcggcgcaatattaaggagcttgaagaagtatttgtctatgatgagcggggaagagatcaggaagatcgctttttgcctattccatggttttcggaattatctattctttttgagacgggtaaagtaggagatttgcgagaacgtgtggatgagatttttgagttgcttgctgcccaagagggtttatctcctgaaatgttacatctctactatcatgccatgctgcatgtggtctatccgctgcttcatcagaaaaacgtgtccatacgcagtctgtatccgggtgaacgggagccggaagagagtatggtgacaaggtcgttgccgcagttgaaacagtggacgtcggatctgattgatcgtgttatcccggtgttgtacccggacgatcatagccccatgaccattgtggatcagttgtgcgtttatattgaaactcatattggtgaagaacttatgcgagaggaacttgcagcttttgccggattcaatcccgcttatctatcacgtctgtttcggaaagagaaggggatgtccctatcggagtttatcctgcagggcagagtagccaaagcgaagacattgttgtcccagtccaccgtcaaagtgacggatatcgctggcaaggtggggtactacaattactcgcatttcaccaaaatgttcaaaaagtgcacgggtataacgccacaggagtttcgaaaacagtcacgtaccgtatagttcagggcgcagcatgctgcgtcttttgtttttttttggtactaaagtcataatttgataagtcaacaggtcaccacagcagatagaggtcttactcgccccgccgtatacttgaaccacaggagccgcaacggagcttcatcctgaggaagaattcaagaggagtgagggagaacaagttatgaagacacaaccccaggcgggtaagggagtacggatatcggaaataccgggagaaacagtccgaaagcgcaagtctgtgtggcacaatcttggcaaattcaaggtgctgtatctcatgttcttgccaggtgtcctgtttctgctggtgaacaactatatgccgatgttcggcgttctgatcgcattcaaaaatgtaaactatgctgatggtatttggggtagcccatggagtggatgggacaattttaaatatttgttctcaaccagtgatgcatgggaaattacccgaaatacactcgcgtataacacggtgttcattgcactgaatctcttagtaggtgtcgggcttgctattctgctcaatgaagtgaagaacaaggcaatgtccaagttatatcaatcacttatgttattaccgtatttcttgtccatgattgtggtcagttatctggtactggctttcctgggcaaggattcaggcttcatgaactcaacggttctgcagatgttcggcggtcagccgatcgactggtactcagagccgaagtattggccgtatattttgccactggtgaacacatggaaaaatattggatattatgccgtcatttatctggcagctgtcgtgggtatcgatgaagaatattatgaagcagctgtgctcgatggcgcaaccaaatggcatcagatacgcttcatcaccattccgtttctcgtcccattaatcgtcattatgacgttattgcaaattggccgtatattctatgcagacttcagtctgttctatcaggttccattggaatcgggagcgctgttccctgtaacgaatgtactggatacctacgtatatcgtacgttccttatcggtggagatatcgggatgtcatcagcagctggtctataccaagcaatcgttggatttgtgctggttcttgtatccaataccatcgtaaggcgaatagataaagataatgcattattttgagaggaggcaagtcagctgtgaaatcacgtgatccactagccgtatcgaagcgttccgcatccgttattcatgcgatgtttctattctatgccattgcctgtatcgtgccgatcctgcttgtcttcgccatctcattttcggacgagacaacagtaattgccaatggatataagcttattccagagaaattcagcctgacggcttatgagtttctgttcagagatatggatcagatcattcactcgtatggtatatcctttattgttaccgttgtaggtaccattacaagtgttgcgctgaccgcattgtatgcgtatccgctctcacggagagatctgccttaccgtggctggttcgcctttttcatcttcttcacaatgttgttcaatgggggtctggtaccttggtacctggtctatgtcaacgtattggatctgaaaaactccctactggcactcattatgccgctactgctatccccattctttgtactggtcatgcgtacattcttcgcgaactccattccggtgtctattctggaatcggctcggattgatggtgcgggagaattgagaacgtttgcacgtatcgtgcttccgctctctcttcccgtaatggcaaccgtcgcgttgttcagtacattgaattactggaatgactggtaccttagtatgatttttatatcagataaccggacgatcagccttcagtaccttatgtaccggacgctgctcgatattcaatatttaacaaccaactccaacgtctcttcacagatttcgtcgcagggtggattgctgaatctgcctaacaaaactctgcaaatggcgatggctgtggtcggtattggtccaattgtactggcatatccgttcttccagcgttatttcatcaaaggtcttacggttggcgctgtgaagggataactctgaaccggttagcggagtgggcaaggtaaatgaagatggactgaaagggcatatacagaagtagttatcggtttaattgtgaattggggaattcggttgtatggttcaacacatgacaggaggggttcaattggttagatcattaaaggtatggtcacgcatgatggcaacggttatggcgctgagcctggtgctggctgcttgctcatcagacaagggtggaacaacaacacctggcgcagaaggcggaggagcaagtgaaggtgggggcaaaccctatgaagtgacactgttctacccagggacaccacagaaggatgtcgctctggtggaagccgagattaacaaaaagatggaaccaaagatcggagccacgcttaagatcaatgcaattgactggggacagtgggataacaagctgaatctcatgatttcctcaggtgaaaaatcagacatcatcttcacagcagcttggcagaactacacggtgaatgtagctaaaggcgcattcttgcccttgaatgatctgcttgatgcacatggtcaggatattaagaaaaacctggaccctgcctttctggaaggttcccaggtggacggcgtgaattacggcgttcctacgaataaggaactcgctgccacacgtggtgtgttggtacgtaaagatctggctgacaagtataagctggacctgacagctgtaaaaacttgggctgatctggagcctctgctcaaaacaatcaaggaaaacgagccagccatcacaccattctatatgtccaataccaacggtaacgggctgttagagaatctggattgggattatctgggcgatgcttccgtacctggagtcatctccaaaacagcaggcggaacaacggtgctgaatgaagtggagaccccggaattcaaagaagcggctgaactcgctcgcaagtggtatcaagcgggatatatcaacagtgatgctgctacttctaatgtgttcccgaaagaccaggcgaaggctggaaaagcgtttctctggacagatggcatgaagccaggcaaggataaagaagaagaagggtatgtgggtttcccgctgactcagattgagatgacacagccgacaatcacgacgggtgatgcgtctggagcgatgcttgccatctcccgttcttcagagcaaccggagaaagcgatgcaggtcattaacctgctgcattccgacaaggaaattaacaacttgttaaacttcggaattgaaggtacacattatgtgaaaaaagacggacaggataatatcattgctctccctgatggcgtagatgctaacagtcgtacctacaatccaggtgcacaatggcaactgggtaaccaattcctgaacttcctatgggataatgaagatccacagaaatgggagaagttcaaagagtttaacgccaaaggtgtgaagtcgcctgcactgggctttacattcaacagccaatctgtcaaaaatgaaattgctgcggtcaacaacgtgaacaaacagttcaagccgggtatgacatcgggcgcagttgatccaaatgagatgattccgaaatatctggagaaattgaaagcagcgggaattgataaaattattgcagccaaacaggaacaactcgatgcattcttgtctaagcaataaatgatcgtcagccatgacagagagacctgtgttattacaagctcttgtcagcggtgaaaatggaggacgttttcggtgaacaaccgaagacgttctttttattgttgtcttttgatttggattgttaatcataaataggaaaaatatgatataataaggtggttgattagggggtgttcgtgtgtcgagaaccagacttgtgttctcaggggctttattgctatttgctatcatctttacatttaaccatcatcttggtttttctgttggagataccatgctgtcagcaataggtatatcaccgtatactacatcttacttgagtggagttcatatcacacttttcctcggattggggatattcgcgtgtggattctaccttactcgcaaagagattggaaaatcattccccggtcttgcaaaagggttatggatcgtagttatcgctatcgttctcagttattcgtacatgacggataaattcatgtatgtagccaagtggggagcttcaggcattaatgcggtatcctatgtacagaatgcaagctcttgtacctttaatgtgctgaaaacgggtgagacccgagcaacttgtgacctgacactcaaaaattacggcagagattccgtatccgccgtgttattgcctgatctcgcacgcagttataagtttaaggacgatccactattggaagccttgcagtctgtccaattaaggcccgtacatgttgagattgaacgccatggaacgtttacaggtaagttggagttttacgggaaagcggaatcccctctgttcgtcaatgggaaacttatggatattgtgctggatgtaggcgtggatggagcgaatacggtatttgattatgatattccatagttgatattttcatagaaaaaaagaataattacataaacagaagtggaataaagtttgagttgaatagaacgattaaagatatatactgaaattagatagagagctggctaattcgctggctctttttgtgcgtggaagttgcatttagtgcagaaatattggttttatctcctttccccttgaattggtaacgcttacgctagataatgaatcggtttgtctcaaaaaaattgtttgtctttagcgcttacatcattacaattaatgtcacgacaaattaagacaaggtgagatgaaaagatgtcatatcggacaaacctgttttccaaaatggtcattcttattctgattatgctgattcctgtagtgcttttgtactggtactccaatcacaaaacaacagctgttctcagagatgagttgaatcgatcgaatagtaaccagcttgaatttttccaaaatcaagtgaacacacacatcgaactgttatcctcatggccgaatctgctcatacatgatcctgatattggcagcttccggcgaatctatgcggacagtaactactttgatctggatgcgatcaacctggtcaaacgtattcagaataagctgagtattcaggaaagctcatccaattgggccacgaaattatatctgtattctccttcgctgggcagggtggtttccgaaagggacgcacgttcttacgataaagaagcgctaagggaaaatatcatttccggctgggatgtacgcaaaattcaggatggggaagatgatcggttcatgtttagctggattacggtatccccatacggtattaaagacccggctaataatgcagaaacgattattaaactggagtttgatagtgacaacatccgggatatgctcgacaaattcaaagacgatggcaggcatgaccccttctatttccgtgaagaatcgggtgttatctataaccggacttcagatcgttcattaacgaatcagttgatggaagaactgtccatccataaacttcaggacgttgataatcgtacagtagtgatcgggaacgagccttacatggtcaacacggtgaaatccagtacaacaggctggtatttggtggactacatgcccctgtcagatattctgaagcccattcatcaatccaatatgctgttctattcttccatgatttgtttgttgttaatgagttttggtgtggcgtacttgttctatgtacaggtgcaggtgccagtgaaacaactcattcgtgggttccagcgattgaagcaggaagattattccgtgaggattaagccaaagggccgcaatgaattcagtttcctgtccgaacgtttcaacttgatggtggagcagatccaacagttatttgaacacgtttacctggaacagattcatgtacgtgaagctcggttgaagcagctgcaatcgcagattaacccgcacttcttctataattgtttctccttcattacaagtatggcgaaactcaagcgtatggacgctgttgtagcgatgtcgcataatctatcgcgatattatcggtatacaacaagacaggagcgggacgtggtaccgttgacagaagagattgaatttgtcagctgttatctggagatccaacggatgcgtatggaccgcattcattacaagattgatctgtctgatgagatgttaagacaggaggtaccgccactcatcgtgcaaccactagtggagaatgcggtgattcacggtatcgaagcggacgcggaggccggagaaataagagtatccggggaaaaacagggcggtgtcatggttcttgtggttgaagatgatgggcaaggcatgacgcaggaggcacgtgaggcgcttctgaataaactcaggggaacgatggatcaggagatgggctgtggcctgtggaatgtgaatcagagactccagcttcgatatggggagcaggcaggactggatgtaacggaatcggaacttggtggattacgcgttacgctgtcatggcctgccgaacaggagtttcttctggagaatgaaggataagcacttggaatgtgtagtgcaagatgaacgatggaattcatttgcagaatgaacgaaatagggagtgaatcacttgattgatatattactggtagatgatgagacatacgtaacagaaagtctggaacttacgatcccttggggagagcttggagtaacgaccgtgctgcgtgccgcatccggtaaggaagcgttggagattatggaggaaaatgcagtagacatcgtagttaccgatattcgcatgcctggcatgtcaggactggatctcattgcagaggtaagcaagcgctggtctcatatccgctgtattttactaacgggtcacagtgattttgattatgctaaaaaagccattcaattgcaggcagcggattatatcctgaaacccgtaaacgatgatgagtttatgggatcggtgtcagcagccattacgtctcttcgcgatgagtgggatgaattcgataaatatcaccggctgttatacagtcggaagtctgactataaaattttacgagaaaatctcatgcatgatctgctgctggggcgtgagatcacggcgcgggcacttcgggaacaactgcaacaatatgagattcatatcgatccggaacaatcggctgtgatgatgctgattcgccttacaggacgtttctcatcaatggaccagcagtctctggatctgatggattttgcggtaggtaatattgcagaggaagtactcggagagcaatttaatgtgtggtttggtcgcggaccccatgagtgtctggttatgttcttgcagaatcaagatcagatcgaagctccgcagatggacttggagacgttgagaatttcagctgaaactttccgtgagcatgtcattcgatatttacagggagatctgtccatggtagttacaccgtcatttccctttaatgagttgacagcagcttatcgaaaaagtctgggttcgcttgtcctttcaggaccggaagaacacaagattatatatatggatatggatcaggcactcagcaaaagaccggagaatgatgcgacgcaggcgctcgaagagctgtacaaaccacctgtacttccgcaattgcttgagaccaagcaatgggaagcggcagcccgtaagctgaacacggtctttgacgcggcagaacaggtacgattgtccagagaacatgtgtatgagatgtatctgtcggtaactaatgcatttatgtatatcgcccataaacaggggcatctggtgcatgagattgatcatgcgggattcgatctgctccttgctcatcagttgattcaatcacctgagaagctgcggcgctgggccaccgagatgctggcgaagcttcaggaagagttgtccgatcaggaaggtgtgcagagccgcagacatgtgatcaagcaggttcaggagttggtgacaagagatacaggacaggatctgtcagtgaaaatgattgcggacaaggtatatttacaccccgtatatctatcgaaaatttacaaggcagagactggggaaggtcttggggactacatgattcgtatgcgcatggaacgtgctctgtatctgcttaagaatagcaacaaaaaaatatacgagattacgagtgaacttggctatcaaaatccgcaatatttcagcaaaatgttcaaaaaacattatggtatgacaccaaatgaatttcgggatcaggcataatttcaacaacattccagaatataggttggcaaaggtgcagaaatcttgatttcgtatcataggctcaaaggcctggtcagcctataatgaaagggtaaccaaaacgatttaagggggaacaacatgagagcgcaatcaacaaaaaagagattcttgacgcttctcgctacaacgctgagtctaactgtcgttcttgcaggatgttcaggaggcagtggaggcggagatagtgcaacaccaagtacatctggaacccaaaacgaatacaaagagaaatatgatccggcagttactattactacagcatggggaatcgatccagagctgaaatttaaaaatggcgaatccatggaaaataacgtggcaaccaagtgggccaaagatcaattcgggattgaaatcaaatcgttgtggtcagtaacagacacaaatggagcatttgcaaccaagcttcgtcttgcgatgtcatcaggacaggaaatgcctgatattgtaaacgtaggtgataatctgcttgctcaggatctgattgattctggaatgtatcaagaagtaggtccactgttcgataaatatgcttcggacacatggaaaaaagcaattgaacaagatccaaacgtatggaaccagtatagtcgtgatggaaaaagaatgggtatccctgttctggactatgcctacaacaatgattacttgctctggattcgtcaggattggctggataagctgaacatgaaggcaccaaaaaccatcgacgaactagaagctgttatggaagcattcaaaaacaataaccctgacggcttggctcctgataaagtcactccgctcagcattggtttcaaaacttccatgaatacatggatgggagacccatcttggatcttcggagcatatggaacattgccgttccaatggaatctgggggaagacggcaagctggagtatggctccatcaatccgggtatgaagcaaggtctgaccaaattgagcgaatggctcaaaaaaggatatatcccgcaggaagcagctctatgggatgagaacaaaacagcagagccagcagttgcaggaactgcgggtattattccaggaccttactggatgagtggatggccacttctcgatacagtgaaaaatgtaccgagtgccgtgtggaaaccgattgaaattccgtctggtcctgaaggcaaagcgatgcgtcacgggacacagttcgttaatggtgttacgttgatcaaaaaagatatggcgcacccagaagcattctttacgtatcagaactacctgttcgacaattatgctgacccggctccgggtagccagtatgacaacggtctgtttgcaggctatgactatcaattggatgcagatgggaaacaaatgccgattgacgagatcgaaggcggatacgtgaacgttgtacgttatttgcttgttcgtgacggtgctcgtattccagatgcacagatgaaagctctgatgaatttggccaatggcaaagagccggaaaccaagcttgaaaaagatgttgctgtcaactacggtaaagagactccagcagcagcgaaagtgttgctgagccaagaagaaatttccttcaagaacatgttcacaggtccgacaacaaagacgatgaaatccaagcttgactatttgaacaaaatcgagaatcaagcatttaacgaaattatctatggcaaaaatccggttgatgcgtttgatacctttgtacaaacgtggaaatccggtggcggtgaccaaattacgcaagaggttaacgaatggtatgacagtgtgaaaaaataattacaaggagcgcccagacgactaacgtctgggcgctttttttgtttattagagctgaggcaaagtggttgaatttgtgccatttatattgcttttatgtgctgtttggaccccgtaaaaggttgatataatcgcattataagccactcagggagtacttgagtaggaagaaatacagggggagcaatcatgagaactttgaaacgcacttggccattccacgttatgctgttgccagccattatctttctgattatcttcagttatgtgcctatgggcggaatcattatggcgttccagaactacaagccatggcttgggattagcggttctgaatgggttgggctggacaactttagatatttgtttgaacgtgaagacagcttacaggtcatctggaacacattaattattgctgtacttaaactgattttcaatttatttgttccatttgtttttgccattcttttgaatgaggttcgcaagatggctgtacagcgaacgattcaaacactcgtatatttacctcacttcttgtcctgggtcattctgggcgggattttgatagatctgttgtcaacaggcggcttggttaaccgggttctgggaacctttggacttgggccatatttcttcctgggagacaacagttggttccgatctacggtcattctgacagatgtgtggaaagaatttggctataacatgattgtctttctggctgcccttgccggaattaatccagcgttgtacgaagcagcggagattgacggagcaggacgctggaaacagacactgcacattacaatcccttcgcttgtgccgatgttgatggttgtaggaacactggcgcttggtaacgtactgaatgccggatttgaccagatattcaacttgtataacccgctcgtatatcaaacgggtgacatcattgatacatttgtatatcgttccgcaatgcagaacggtgagatgggctttgcaaccgcgatcggattattcaaatcggttattagtatgatcttgatccttgtatcgtacagcttagccaaaaaatacgctggatatcgcatattctaaacgaatgaacagagaaagaagggaccacgatgtatcataaatcattgccttatcgcgtgtttaatatagtcaatacctgctttctgattttggtcgccattatgtgtatcgtaccaatgattcatgtactggcagtatcctttagtacaaaggctgctgccgatgccaatctggtcaatctctggcccgtaggtttttcacttgaggcttacaaaaagacgatgaacaatccaattttcttgaactcgctctggatctcacttctacgtacagtaattggtacagctattaccttgctgattacgttcctggcggcgtatccgttgtccaaagagaatagtgaattcaaaggcagaacgatctactcctggatttttgtattcagtatgattttcaacgggggactggtgccgttctacatggttatccagaagatcgggttgatggattccttctgggtactggtactcccaggagcagttaacacattccttgtcattctgatgctgaacttcttccgcggtattccaaaagagctggaggaagcggcgctcatggatggagctaaccatttcagaacattgttcaggatcttccttcccatttcgatgccgtccattgcaacaattgcattgttcagtatggtgttccactggaattcctggtttgatggattgctctacatgaataacgccaaggattacccacttgctacatttatgcaaacggtcattattggacgtgatatgagtagcatgagcatgaatccaaaagaaatggaagctctctctcaaactacggtaagggcagctcagatcttcatcggaagtgcaccgatcttgattgtgtatcctttcctgcaacgtttctttgtcaaaggtatgacgttgggctcagttaaaggctgagcctgtaccccaaattaatggaggttgatacagtgagcaacttgacggaaaagacattcattctgggaatggatgtgtcctttatggatgaaatcgaacagcatggcgggagttatagtgatgtggatggcaaggaacaagacttgctgtccatcctgaagattaatgacgctaacgcgatacgacttcgaatctggaatgatcctgttggtggattctgcaatctggagcggacggtggaggtagccaaacggatcaaggaacagggcttgaaatttttgcttgatttccattattctgatcgctgggctgatccagccaatcaatggaagccgaaagcatgggagcacctgtcctatgaagagcttcaacatgcggtatgcatgtatacagctgacgttctgagaacgttgaaggaacacgatgcgcttccggacatggtgcaggtgggcaacgagattacaccaggcatgttatggaatgagggacgtgtcggtggagaagagcatgatacggatgaacagtgggagcgttttgcaggccttgtgaagtacggaattgctgcggtcaaatccgttgacgcggatattcagattatgatacatattgatcgtggtggagataacaccgagagccgcaagttttacgatcgctttgaagcactgggtgtggagtttgatatcattggtctctcgtattacccttggtggcatggcacacttgatgcgttacgtgacaatttgcatgatctggctgagcgttatggcaaacctatcaatgtagttgaaaccgcttatccatggacgctggagcagccggaaggcattgaatggattttgaatcaggaagatatgttgttaccgggataccctgcaagtgtagagggacagaccaaatatctgaaggatctattgcaaattattcgcgaagttcctggtggtttggggcacggattctattattgggaacctgcctggataccaagtaaagaagaatggtccgtcggtcatccgaataactggggcaacctcaccatgtttgattttaaaggtcgcaagttggaatcgtttacagcacttgctgctgttgaagaatcagatgtcgtgacatacgtgtaatctagcgtaatacgtatcgtctgtgaagtcgttgttatcgttatcgttatcatatataaactaaaaaaacagtaattaaagcaagggagttgtccttatgacatacaaatttccacctgtaagttccaaagccccgcacatgttgcatggcgcagactataacccggagcaatggctccgctatcctgaagttctggaagaagatattcgcttgatgaagcttgccaagtgtaacgtgatgtccattggtatcttctcgtgggtatcccttgagccggaagagggtgtatacacgtttgaatggctggatcaggtgttggatcgttttgcagcaaacggtatctatgcattcctcgctacaccaagtggtgctagacctgcttggatgtccgccaagtacccggaagtgctccgtgtatccgagaagcgtgtccgcaatctgcatggtttccgtcacaaccattgttatacttccccggtataccgtgagaaggttactgcgatcaacacaaaactggcagaacgttattcggatcatccggctgtaatcggctggcatatctcgaacgagttcggcggagactgtcattgtgattattgtcaggaagcgttccgtggttgggttcagaagaagtataaaacactcgatgaactgaatcattcgtggtggaccacattctggagccatacggttacagactggagtcaagtggaatctccggctccacacggtgagacacaggtacacgcaatgaatctggattggcgccgtttcgttacggatcagacagctgattttatcgtgcatgaaacaaaaccgttaaaagctcagaatcctgatctgccagtcacaaccaacctaatggaattctatggcggtctgaactattggaagttcgctgatattctggatttcctctcttgggacagttatccgacttggcatgatgcagatgacgacgcgaaacaggcatcccggatcgccatgatgcatgacatcgttcgttccatcaaaggcggtcagccgttcttgctgatggagagtactccaagttcgacgaattggcaagatgtcagcaagctgaaaaaacctggtatgcatctgctctcttctctccaggctgtggcacacggctccgatagtgttcagtacttccagtggagaaaaagccgggggtccagtgagaaacttcatggtgcggtggtagaccacgtaggaacggaacacactcgagtgttccaagatgtcaccgacgtaggaacggctcttgaaggcatggaagctattgtaggaacagcggttccggcagaagttgcaatcatatttgattgggaaaaccgctgggccgttaatgattcccagggtccgcgtaatatcggtgtgaagtatgagcagacggtggaagagcattacgaagcgttttggaaaaagggagtcgctgtagacgttattgatatggatgcagatctgtccaagtataagttgctgattgcgccaatgctctatctggtacgtgaaggtgtcggggaacgtattgagaagtttgtagaacaaggtggtacgtttgtagcaacttactggtctggtattgttaacgaaaacgatctgtgtttcctgggtggattcccaggcccgctgcgtaagacacttggcatctggtccgaggaaattgacggactgcatgatcgtgatctgaacggaatcattccggagaagggcaatgagcttcagctcaatacagcgtatgatgcaattgaactgtgtgatctgattcatctcgaaggcgcgaagtccctggctacgtaccgttctgacttttatgccggacgtccggcattgacggttaaccagttgggttcaggaaaagcatattacgtagcgacacgtctgaaagcaccattctatgatgatttctatgcgaaactaattgctgacctcaacattgagcgtggacttgagacagagctgcctgccggaacaacggcacatacacgtacagatggtacagctgattatgtgtttgtacagaactacacgccagatgagaagctggttgaactagatggacagtcctataccgatctgctcagtggtgatgctgtggaagcaagtctcagcttgaagccatatgacatttgtgttctgcgcagaccggctgcccggaaataatgtaggttcatccttactttataaacggagttaggatagacaaagagtgccctgaacgcctgcattggtgttcagggcatcttttttaatttatgcatttggctgttgaaccactttttctggacaagataaaggataaacgtgtccgcgtagcgaagacaaacacgtaacatgtaactcaagactttcagtctgggaggaatggaaatgaatcaaagaaatttggatggtaacagcattattattcgactggaaatgacaactaaggatatcaagtttggcgaagtggcttcggtcatctcggaagctgggggagacatcattgccatcgacgtgatttccaccaatcaggatgtaagcgtgcgcgacttgacggtcgcagttacagatgcacaagataacagtaaaattatagaaggggtgcgccagctcaaaggtgtgtccattattaatgtatcggatcggacgttccttcttcatctgggcggtaagatcgaagtaacaccaaagaccccgattcaaaaccgggaagatctgtcacgtgtgtacactccggatgtggctcgtgtatgttcagccatttcagaagaacccggcaaagccttctcattgacaattaaacggaatacagtggccgtcgtatctgatggcagtgcagtgcttgggcttggtaatattgggcctcgtgcagcgatgcctgtcatggaaggtaaagcgatgttattcaaacagtttgctggtgtggatgctttcccaatctgcctggatacacaggataccgaggaaatcatacgtactgtgaaagcgatatcacctggttttggcggcattaatctggaggatatctcgtcaccgcgttgtttcgaaattgaacgtcgtctgaatgaggaattggacattcctgtatttcatgatgaccagcatggcacagcggttgtgttatatgctggtctgatcaatgcgctcaaactggtgggcaagtccattgaagatgtgaagattgtggtctgtggcatcggtgcagcaggtgtagcgtgcagcaatatattattgtccgcgggagccagccggcttataggtgtcgatcgtgagggtgcaattgtacggacacaaacctatgagaatgaagtctggagtgattatgcagctcgtactaatcccgaactggagactggttcgctgcgtgatgtcattcgtggagccgatgtgttcattggcctatcccgcgggaatctgttaactcgcgaagatgtagagaccatggcagaagatccaatcgtgtttgcaatggcaaacccggtgcctgagattatgcctgccttggtggaagacattgttgctgtaatggcaacaggacgatccgattatccgaatcagattaacaatgtgttatgtttcccgggcatgttcagggcagttttggattgccgagccaccgaaattaatgaagaaatgaagctggcagccgcgcaagcgattgcttcggccatcacggacgaagagcgtacacgttattacattattccgagtgtgttcaatgataaagtagtcaaatcgatgcgcagtcgcgtaattgaagcagctattaagacgggtgtagctcgacgtattcctcgtgaacaggcccgtgaaggcggggaatcgtaagatgtcagagaaccctcttcaacctggtgggaatctgcaagaattagggcacatgcgtaatatagatggaataacggcaggagaggctgttctgcgcgccgcccgatcctttgttcaaggggactcatccaagcatagtgatggtcatgactggccgcacattgaacgggtaaccgcacttgcggttgaactcgctcaccgtatgggtgcagatccatttgtctgcgaactggctgcattattacatgatgtaccggatgagaagctgaatgagagcttggaagccgggatggccaaactgaatgactggctggatacccagcctcttgacccggatatacgtaataaggttgtgggtattattagcaccatctcatatgcgggaggacagcgtcctgcggtcagctcgcttgaagcacaggttgtacaggatgcggatcgactggatgcattgggtgcgattgggatcgcgcgaacctttgccttttcaggcgccagagggcgcgagatgtacgatccttcccttcccccacgggagcagatgacccgtgaggaatatcgcaatgggcgcagcacaacgataaatcacttttacgagaagttgttcaagctcaaggatctgatgaatacctcctatggcaaggagctggcggaacagcgtcatgattatatggtgcagtttgtggaccagttcaaaagagaatgggagggcacggaccgttaggcaggcataataagcatgagcattccacagaggtatcataagtaacagaggcgaatctttgaagtggtgaaaatccattttgaagatttgcttctttttgggttaataatgtgtattaacatacataaaggaatcaatttcacaatacctctgacttatgacatggcaacggaagaccttacatggtacaataaatcgttctcctgaatgaattcaggcaaaaaaagaaatatggggtaataatgaacatgattatcaaatgtaaaatttcaggttcggtaaagaggagggggcatcaccatgtcgtttggtgcacgtgtacttaagacggggatcgcggtcacgcttgccttgtacctaagcagcctgttcttgaacccgcaatctcccgtgcctgccgcaatcgcggctatattcgccatgcagccttccatctatcgttcctggaaatacttcctggatcaattgcaaacgaccacgctgggagctattgtcgccctggtggggggcatggtgttgtccaatgagccaatcgccgttggattaattattgtacttgtcatcatgatctgtcttaaattgaatatgggtgagacggttggcctgacactggtcacggttgtatccattatggaagcctcgggtgactggcattttgcactcaatcgttttctgttgacactggttggtattgtatcggcgtttctcatcaatattacggtatttcctccgaaaccgaaggttcagttcgtgaagcagatccatagtgtattcagcggtatgtcattgcttctgcgaacttcgatctcggatgagattaaggaagttgtattccgggaggagaaaagcaacctgggcggttccattaagtctttgtccgacaagtataacttgttcgaagaggaacagaaaaagatgaaacgttcgaaattcagcgaaactcgtcagatggtggtctacaaacaaatgctgctgagtctgcaaaaagggtatgaggtgctggattcggtggaacgccactatttccaggcgccgcggacaacggccatggaccagttttttgactcacatcttgaactggttatcaaattccatgagcatgcactgctcaagttcgaggataagctgaaacctaatggggaagaggccgcacagtttgtattggataatgaccgtttcatggagcaggcgatcacccagtttgatatcgacaaggaagggatgttacgattgtctatcgtggctgctgccatttatgattacggatatcagttggaacgtctgaatcgacttgccgaacatgtgcatagcgccagtgaagacaaagaatcacaggacaaaattttgaattggcttaagtggccttaaattcaagttcaaaaagtctggttttcagtaccaagaagatggaattaagctagaaatggagtagcggagcgtaggacaactacgtgagcaacggacatttcggctgaatttcatattcgatgctgatgatgccgttaggcatgattcgtaatcaaaattagactttttgaacaacctctctaagtgcgaattgcgtacctgcttggcgatcatatacaatgtagttacaacatagcccggacaatcgtgtccgggttgttttgtcatacatagggctgaagggcatgaatgaatattaacgaactgagggatagagacatgattatagaggaattggacgctgaactaatggaatggttgagtgggacaaatctggagcataaacagcatgaagccatgcaactgctgaccgtatctgaggatcaatggccgcatcaggcgatgatcagtatgggggaagtgattgcgataaatccgcatcagcttagactggctctatggccaggtacacagaccagtatgaacatgagcaaaacaggcaaggctaccttgattgcggttcaaggacatcgattgctgcatatccgtatagaagtagaacggctgcctgagatgaagggggctgttcatccgagagatcgttttgaagcacaagtgctccaggtacgtgtggatcacgcgccatatgcggagatcacttcaggaataacctttcaattgaaggatgaacttggagcaattacacgctggaaagagacaattgaagaattacgaaagtaggcaggagtagctaggtcagttgaggacctggtgattgggtaataatgaagaagaaaacaacaaaaaacgcctccgcttgcatcgggacgttgtcactggtacaataaaaaatggttttcagaaaattagaactaattaacatataattaaaatgtttactttctaataattataccattgccttttcgggcttgtcaaatgggattttgaggacacaatccggggaaagaggggctattaacatatgagtacagatcagcaatggaatgtggaacaacaacgggtcaacaccgtgaccgatcagattgaacgaaagatctcaacgctggaagatgaagttggttccttccgtgacgaagtggttggcatgagaaaagacttctgggacgaagtcacgatgaactttagcgaagcggatgatgttggggagacttcaaccagcatgcggcagcagtcacaggtattgtccgatcgggagcgcagccatctaaatacagcagctgcgttggataaaatgaaacgactgcatcattcaccgtattttggacgcattgattttaaggaagatggatatccaaatgcagaacgcatttatctcggcattgcatcgttgctggatgagaaggaagaatcttttctggtctacgactggcgtgcgccaatctccaatctgtattatgacggagcaccgggtccaatcacgtatcatacacccagtggggagatcagcggggatatagagatgaagcgacagtttgtcattcgggatggtcgtatccggtttatgtttgacacaggggtcacgattggtgatgagttgttgcaggccgtgctcagtcgaacttcggatgcacagatgaagagtattgtagcgaccattcagaaggagcaaaaccggattatccgtaatgaccggatacgtatgctcattgtgcaaggcgcagccggcagtggcaaaacatccgcggcgctccagcgtgtggcatatcttctctataaataccgcgagcatctgcaagcggatcagatggttcttttttcaccaaatccaatgttcaacagttatgtctccacggtactgcctgagcttggggaggaaaacatgttgcaaacgaccttccaggagtatctggagcgccgtttgggtcgtgaatatcaactggaagatccgtttattcagcttgaatatgtacttacggggacggaagatcccgattacgatgttcgcatgtccagcattcgcttcaagtcgtccgaaacgttcctcaaggtgattacacgttataaggaaagtatgttgtcaggtggcatgaaattcaagccggttcgcttccagggccgagcgattgtcacgtcagaggctatggctgagaaattctacagtttcgagtcatccgttaagctggtgagtcgactggagatgttacgggactggatgctgaaagaactgtctgcctttggtaaaggtgaactggatgcgccttgggttgatcagcagcttgatctgatggagccggaggatctgcaacgtgcgtatcaacggttgaagcgcaagcaaaaaggaaagacccatacgtttaatgacttcgagcaggaaagagggattctggcacgtatggtggtcagtgaccgactcaaaccgttgcgaaaatggattaagtccttacgattcgttgatataagacaattatatgcacatctattcaacgatcaggctcagatggagcgattgctgggtgacgaagtgctacctgctcaatgggatgaaatctgtaagatgactttacgcagattgaagcttcaggagttggcatatgaagatattacgccatacttgtacttgcgtgagcttatgcttggattccatattaactcgaatattcgtcatgtcattattgatgaagcccaggattattccgcgtttcagttggcatttatgaagagattgttcccacgggcgaaaataacagcacttggtgactttaatcaggcaatctatgcccactcttcagtacttagtggaacaggacccttgactaacctgtacggaccagacaacacggaagtcattgagctgaccagaagttatcgatctacccgggagatcgtggagtttacacgtggcatggtgcctggtggggaagagattattccatttaaccgcagcggtgagaaacctaaagtgatcgtttcttctgattcagagcgtcatatgaatgtaatcacgacagacctcaagcacttgattaaggaagggtacgaatcggttgcagttatctgcaaaaccgccgaagagagcagagacgtacatgctgcattgagtaaggtgctgcccacagcaccgaagttaatcaaaaaaacgacgctggcttttgagcagggtgttcatgtcatcccggcgtatcttgccaaaggtgtggaattcgatgctgtcctgatctatgacggctctgcggagcagtatgctcaggagcatgaacgcaagttgttctatacggcttgcacacgagcgatgcatctgctgcacgtttactgcgtgggcacaccaagtccgttcattaccgcccagtcggaagaacagtatgatcttggcaaggtgtctactgcgcaagtggactgacataacacttcatatgcataaagaaggcttccgttcaatggaacgggagtttttctgtatatgatacatatatcgggaagaagctagcttagcgagggaattatacgtgatgaggttacagccatataggtgatcgtattgataaaaatacctaacgtgaattcgtaaggattgggtcccgtggataaatacgtctgcataatttgtatttaaacacaatggatgtgatttttctttacacatgaggtccggactcatataatcgtaacaatatattttttttggatcgtttattaaaggaggcaacaaaatgaacaaaccatcttttgaacggccacttatggccgattgtgtaccggatctggtcgctacagcacggggagatttgccagcgactttggtcattcggggaggtacgctggtaaacgtgatatcgggtgagattttgcctgagatgtccatagctgtacagggagctcgaatcgcttatgttggtaaagatgtaagccacactatcggagaacatacgcggattattgaagcaaacggtaagtatatcgctcctggtctgctggatggacactgccatatcgaaagtacacagatgaaagtaaccgagtttgcgagagcggtgttgccttcaggcacgaccggaggtttctttgaccctcatgagatctctaacgtgcttggcctcaaaggtctgagactgatgctggatgaagcacggaccacaccgatggcagcttatatgcaggtggcttcctgtgtgccttccacgcatccaggattggagacaacaggtgcttatatcgggcctgaagaggtagctgaggctctttcctggggtccggacatgattggtcttggtgaagtgatgaacttccctggggtggtctatggggatgagacgatgattggtgagatacaggcgaccctccgggcaggtaaagtggcagacggtcatttcacctgggctgcagatgactggcgtttgccagcgtatgcagcgagtggcgttacaggtgatcatgaatgtgtgaccaaggaagatgtggttgaacgtctgcgcctcgggatgtacgcgaagatgcgccaaggttcggcatggcatgatgtggctgagacaatcaaagcctgcactgagcttggtctggatacacgccggatgatgctggtgactgatgatcgaagctctgaatcgctgctcaaagaaggacatatggattttgttgttcgtctcgcaatctcccaaggggtgaagccggtcacggctttccagatggcaaccattaacacggctgagcgtttcggtgttgcgcgcgacattggagcgattattccaggcaatatagccgatattattctgctggacggccggttggcggatgtacgtgtgggtatgacgattgctgccgggcaagttgttgccgagaatgggaagatgacggcggtctgggacagcttcacgtacccggaggaagcgctgaacacggtgaagttagaagctaatattcagccagtagatctggagttggctgcgccgattcaagaggggacgattggtgccaaaatcattcatgtgacagagaaccatgtggatacaaaggagaaacacctgcctgttaccgtagagaacggcaaggttgtggtttcaacttcaggggaagtatgcaaaattgcggtattggaacgtcacaaacaaactgggaatcgagcggtagcacttgttggaggcatcggcttcacatcacctgcagcgattgcgatgacggttgctcatgatagtcacaacctgttgattatcggtaatgatgatgcgctaatggctgaagccggtaatcgcgtcattcgtatgcagggcggggtggccgtggtaacggcagcaggggtaactgaattcccgctgcggattgcaggtttgatgtcaactgaatcttttgaagtcgttgcagcccaatcggcagcagtcagtgaagctttacagtccgcgggatgtacattgaataatgcgttcatgacgctttcgttgctcgcgctggttgtgattccagaattacgtttgtccgacaagggtcttgtgcggatctcggcagaaggtattgaactcgtgtcccttttcgatgaagtggttgacaatacaccagtagctccatcgggtaataaatgaacggaaatgtcgactagacatcattaaatagggttccatttaaagccgccttagggcggttttttggtgtattttgagagaaaacgctttctaggtcttctggagcttggtgtacatatggcaataatgactgaagtcatgctggaataaggattgaatttgaaaataataaataattgtgacttttgaactatacatacagaactacgaattcccgaaatatagttatatgattctttcgtcgtaagtcttaaagatgatattgcatataaaagcaatacaaattcgtcgtacctaataagtatccattaaatgaatatgaaacgacacaatttcatccagatttgcacgtcagagctgataacttcagagggagtgtacaaatatgaaaagcaaaaggggttaccgttttatcttattactgagttgtttgatcctgtgtgcgagtacagcctgttcttccaaagccattgcggatggttcggtcgacagttatgcaacgattcatggagagcttgatgtgccggtgagagcgacttgggtgtgggataccacccagatccgaagtaatcctcaagaggtgttaaattacgctacagcgaacaagatcaatacgatctatctgcagatgaaccgggatataaagattcctgagtataaaagctttatccgccaggcgagagccaagaacattgcggttgacgtcatggatggaagatcagcgtggggattgacggaaagtcgggaacagattgcatctttcctggactggatcgaggcatatcaggcacaggcgttgtccaatgagaaatttgctggtattcatctggatattgaaccacatgtgcacgcgcaatggaaaatcaatcaagccagtgtaattacccagtggcaaggcaatgtggagtacattgttgagcgagcatcacggatgaagatgccggttgcggctgatctgcctttctggctggataactacaaaattccgggttcaacgatggcggttagcagctggatgatccgcaagtttgattccatcaccattatggcttaccgtgatacagctgctgcaatctatagtgtagcgaaggatgaacttgcggaagcagctctgcttggcaagacgatctcaatcgccgtggaaacaaagcaaagcaaggaaggtgacttcattactttttatgaagagggatctgcttatatggaagcacaattaaaattggtcgaaaaaatggcttcagtacatgcgtcctttaacggtttctccgtacatgagtacacttcatggaagacactgaaaaagtgagaaactgttaagcttcaaagcgtaaggctgatagcagcgaatgagatgagttctaactgagccagtgtggctcagatcagagcgttatcttattcattggctggaagttgataaagaagataaagaaggtgtttgcagctgaatagctgtgagcaccttcttcttttacacctgaaccagggcagactccattcttacgttctcatagaacattttgcgatactgtgaaggtgtagtggctttatgctttttaaatgtagtgatgaagtagcttagatgctcaaaacccacatccatggcgatatcaacaattttgtgatccgtattctcaagctgaacacaggcctgctgaacgcggtaatagttaatgtaatcaacaggtgttttctgcaccatctgtttgaaaaaacggcagaagtgcccttcgctcatattggcttcatcggccagttctttcagctttaatggttcaggataccgtttgtgaatataactgagcacggatttcaggcgctctaccttgtcatgactccctgtagccacagtgcctttgagcggagcaggtctcatatgttcgaacattcgggcaaatatgaggtacaggtacgcttttgttgacatttcacacgtttcggttcgggtagcatggtctgcaaatatgcgtttcaggtgatccaagatttcttgtccccaatcctcatctgccttgatatggctggggggaatcaccgttttgcgtaccagtggaccgatgaatttctcttggaccgtatcgaaggtacggctgccaagcagttcgggattaaatacaatggaagagaatacgcagggcacatcgcccttcagataccccgcatgaatctcacctcgattgatgaagatcgcttctccagcttggacctcaacagtgttcatatcgatctgaaagacggcgcagccctgggtcaccatagtgaactccatctcatcatgccagtggcaatcgagaatgctatccccgttcagttgttgaatatccgggtacacactgacgggatacatggcattgccgtgaatccggtcttcccgtaatcgttcacgctccatatcagattctccttttgtatcattattaatgtaatcgtttccatagattggtgatgatgttcaagaatcggatgtttattatcaaaatcgtgatatatttggtcaaaataagagaagaaattcgttattaatatcaatattattataatataaccaaagggggaaagaaaacatgaaatttactgatggattctggatgactcgtgaagggtaccagattcaaaacccgactgacattcgtgatattgtgcaaaaagagaattctgtgaccgtatatgcggcaactaaatatattcgtaccaaaggcgacactctgaacggtacattgctgaaagcaacgtacagctcaccaatgcctaacgttattcgtgtaaccttgaatcaccataagggcggcgtgaaaaaagggcctgaatttgagcttaacacacaagaagccaacgttgagatctcaaaaaatgaacaaggcgctgttttgaaaagtggcaatctggaagttcaaatcgacaaaacaaacggttgggatattagcttcctgtatggagggaaacggattacaggtagcggtcaaagagctgctggttatattacaggtccaagtaaggaagcatacttccgcgagcagcttgatctgggtattggtgaatacgtttacggactcggtgagcgcttcacaccgtttgttaagaatggccaaatcgtcgatacctggaatgaggacggcggtacaagcagtgagcagtcctataaaaacattccgttttatttgtccaataaaggatatggcgtatttgtaaaccatcctgaacgcgtatcgtatgagattgcatccgagaatgtatctaaagttcagttcagcgtagaaggcgagacgttggagtacttcattatcggcggtgacaatccaaaggatgtacttgataattatacgaaattaacaggtaaaccagcgcttccaccggcatggacttttggtctgtggctgacaacatcattcacaacggattatgatgaagcaacggttaatcatttcgtagatggcatggctgaacgtgatcttccgctgtctgtattccattttgactgcttctggatgaaggaataccaatggtctgattttgtatgggatgaagcgatgttcccggatccggaaggcatgcttgcacgtctgaaagaaaagggtcttaagatctgtgcttggatcaatccatatattgcagaaaaatcatacttgttcgatgaaggtatggagaacggttatctggtgaaaacagcggatggcagcgtatggcaatgggatatgtggcaagcaggtatggctctggttgacttcacgaatccggatgctgtgaactggtataagagcaagctggaagtcttgctggatcaaggtgtagattccttcaagactgactttggtgaaagaattccgacagatgttgtgtacttcgatggttctgatccggttaaaatgcacaactattatacacagctctataacaaagctgtatttgaattgctcgaagagaagattggcaaaaacgaagctgccctgtttgcacgctctgcaacagcaggtgggcaacagttcccggttcactggggtggtgactgctcttccacgtatgaatctatggctgaatcgcttcgcggtggcctctcactggggctttccggtttcggattctggagccatgatatcagtggttttgaaagcacagcgagccctgacgtatacaaacgctgggtacaattcggactgttatcttcacacagtcgcctgcacggaagcacttcctatcgtgtgccttggctgtttgacgaggaatccgtggacgttgttcgtgactttaccaaactcaaaatcagcctgatgccgtacctgtacaattctgcggttgagtcaacggtaaaaggtattccgatgatgcgcgctatgctgctggacttcccagaggacccaacaacatacagcctggatacgcaatatatgtttggtgactcgattctggtggctccaatcttcaacaaggaaggtgatgtgcgttattacctgcctgaaggaacttggacgaactatctgacaggagcgaaagtacaaggtggacgctggatcagtgaaaaccatgactttaaaacactaccaatgatgattaagccaaacagtctgatcgctgtgggtgcggtggatagcaaaccggattatgactttgcaaatgatgtgtccctgcacttgttcgaactggctgatggtcaaacggctcaagctgttgttgtgaaccaagcagctgaacaggagctgacagttaacgttacacgtaatggatcagtgctggatgttcgtgctgaaggtgcgggcaaaccttggaacatcgtacttcgcggtattgaaagtgtatccagcgttgaaggtggttcccaagtgtctggtgcaaatggtgttgtcgttacagcagcaacaggcgcaagcgcgcttacaatccaactgtaaaatgatatagtaaaagaaaaggacggtgccgaaaggtgccgtctctttgtctacgatgataggagattgaatgaaatgagtacaatgaattctggtttgcactgcacgatatcagcagagatgctgcatcatctggtagaaattaattttggaagcgataccaaagtgaaggagtctggtctcctgcaaggtggactttttaatacaacctatcggattcaacttgaacatacaccctatacggatgtgattttacgtttggctccagagcggggagagatggcggctggttctgcgagtgatcccctattttcgtttgaacgcacgatgatgtcggctgaaccgattgtgtatgaatattaccgtaaggcaggcattcctgctcccaacattatcgcttgtgatgacagcggatcgatcattccaagaacgtacatgtttatggaatttatccctagtaagcagctggatcacgcatcaatttcagacataaacaaagagcgattgtatcatcagcttggcgtctataccgccatcatgcatcagatcgagggggcatcgtttgggtggccgcagggggacggttcaattaaaggctcggatcaatggtccgaggtgctgcactcttttgcagaagaaacggcacttaaagcggcacaagccgattatatgtcaggtgtgggagaagagattgcagctatattcatcaagaataaagacttatttgatcaagtgacccgtccggtactcgttcataatgacctgtgggaagcaaatgtacttgttcatcaggtaaatggtgagctgaacattgcggccatcattgacggagatcgttccatgtttgccgacagggagtttgaagccatattgtctacagaatcggtggcttttcatgaaggatatgatcgtccactggactcatccgctgaaggacaggcacgcaggcttgcgtaccgaatactgtcttcgtattttaatgcctacgttcatgaacatcaggtcaaccaacctgaagatggtcagaagtatcgccagcgcacgctggatttactgcagcaatggaagcaacttggacttaactaattcgcagggggaatgaaggatgaaggagtatcatcaatacccgatgtgggatgcgtcactttcacttggggaaaggttggctgacctgattgcacgattgacaacggaggagaagatcagactaattcctacacgcgaagcagccgtaccaagactgggcattccagcctacaacgttgggggcgaagctgcccacggggttgcttggaaaggggaggcaacggtatttccgcaaccgctcggtctatcaagtacctggaatacaaggctcatgcgggagattggttcagtcattggcgatgaagcgagggcataccatcaccgtaatcctgaggttcacgggttaacattgtgggcaccaacggttgatctggaacgtgacccacgctggggcagaacggaagagggatatggcgaggacccggtcctcacgggagaaatgtcggcggctctcgtcaaaggtatgcagggaaatgatcctttttatctgaaaatggtcgcgacattgaaacacttttttgccaataataatgagaaagatcggctgaattgttcatccagcatcgatccgcgcaatctgcgggaatattatttaaaagcatttgagacaccatttgtggaaggtggagccttgtccatgatgacagcttacaattctatcaatggtacacctgctattgaaagtccatatgtgaatgatgtggttaagggtgagtggacgatgccaggtttcattgtatgtgatggtggagacctgtcacagacggtgaactatcatggttatcacaccagtcatgccgaatcagcagcaggtgcgttgaaggcaggagtggattgtcttacagatgaagttgaacttgttgtatctgctctggaagaggctcttgaccataatctgttggaaatagttgatttggacagagccatccgcaacatatttggtgtgcggatgcgacttggacaactggatcagtcggggcaaaatccatatgcgtctattcccgagtcggtattatgtgcaccggagcacgccaaactcagttatcgtgccgctgctgaatcgattgttttgctccaaaatgatggattgcttccgttgcagccagaagtgttgcagaaaatcagcgtgattggaccacttgcagatgttgtctataccgattggtacagtggcacactgccttatcgtgtatccgtcctcgatggattgcgcaatcggctacctgaagcagacgtgacctatgtcgatgggaatgaccgtattcagctgaagacaacagacggacaagttataaccttgggtgcggaaggtacactcgtcgctgtaccggagggcagtgcatacacagcaaccgaatttgtacatcaggattggggttggggaagtcatacgctgagaagtgtgaacaataatcgatacgttagcttaaccgagcaaggcatctatcaggcaaacgcaccggagattggtggctggtttgtgaaggaagttgttcgaatagatcctctaacggatggaagtaacaccttgcggacatggaacggtattcctgttggactgagcgaatatcagggacagtttgctgtatcaccaccacagccacaaggagaacaaactacagctacaggtacaaatccgaatgatgttggtgaatctggacacgcaagtcagtcaccaggcaatacacagataccttctgcattcaatattgatattgtgaccagcggaatacaacaagccgtagaagccgcacgtagcagtcaggcatctgtcgttgttgttggcaacagcccatatatcaacggcaaagaagagattgaccgcccaagtctgctgcttccgccgagtcaggtcgagcttgtcaaagccgtgtgtgaagccaatcccaatacagtggttgtcattatgggcagttatccatttgccttgcaggagttgaaaggtattgcccgcgcaatcgtttatatgacacatgcaggtcaggaattggggaacgcgcttgcagatgtgctgttaggtcattatgcccctgcaggcagattaaacatgacatggtatgaagacgaatcacagcttcctgacatgatggattatgacatcattcagaatggcatgacttatatgtatcatgaaggaccagttcaatatgcatttggtcatggtctgacctattcggaattcgaatatgaagcgattcgtgtaagtcgaagtgcttcggcggaagccactaccacagatcatttgaagattgaggtggagtttcacaacgcaggtgaacgtgacagtgatgaagtcgtacagatctatggatcttcacatacctcccgagtgaaacgcgctcagaagcaactgcttgctttccgtcgtgttcatgtcaaagcagggacgcgtgttacgataagtttcgaagtccctgttcagaagcttgcgctatgggatgttacccgagatcgatactgcctggagacagcgacctgggccatcctggcagggcgttcttccgcagatatacgtcagtcggctgatattgaaattgaaggtgagacgattccggatcgtccgctgcacttgcttacctttgccgagaattacgatgcttgtgcaggtgttctactggatgaatgtctggaaggacgttcgggagttcgggcaatcactccgcaagaacccttatatcgagaggagcaatcctcctggatcgcttttaaccataatgcttttcaagaagtacaaggatttgaagccagagtggcagcttttggggaagagggcagactggagattcgttccggaggagcggagggcgaactactcggtgtgtgtgtagtttctggacctggaggcagtgtgaatgggaaagatatcaagtggacaacagttcagtgttcgatcgaggtcccacataaggtgaatgagctatatattgtcttcaaaggtggagcagcgttacggcactttagattgttgtagttgtagcatgtcctgaataatcaacctccgaaacaagcacaataatgctgttgtgtgtagaatctgtaaaggtggttgtggtatgaacgataaaaagtgggacctcgtcgcacttgcttccatccctttaattatgaccttgggtaactccatgctaataccgatcctgccacagattgaacgtgaattgaaggtatctgcatttaaggtcagcatgctcattacagtctacgctgtcgttgccatcctgcttattcctcttgcagggtacttgtcggatcgttttggcagaaaagcagttatcattcccagcctcgttattgcagccgtcggaggtgctgtcgctggtgtggcagcatggatgctgaacggaaacatagcctactggaccattctgggtggcaggttattgcagggaataggtgctgcgggcgcatttcctattgttattccgttggttggggacatgtttaatgatgagaatgaagtaagtaaaagtctgggtatcattgagacctcgaatacgtttggtaaagtcataagtccgattctgggtgcagcgctggcggtctggttgtggtatgcgccattcatggctattcctatcctttgtgtgctttcgctggttcttgttattttcctggtgaagactccccggaaaaaagaaaagcctcccacctttcctgaatttgtagcatccattcgtgacgtattaaaagaaaagggacgctggttgtatgcgttgtttgcaatcggtggtatttgcatgtttgtcatctttggtgtgttatattatctatccgagacgctggagagcgaatttgccctgaaaggtgtacttaaaggacttgtccttgcgattccgctggcagcgttatgtctttcttctttcctggcagggaagtggattgggaagaacaaaatgcgaatgaaatggctcggctttgcaggacttgcgcttctgacggtatcccttggcgttataggtttattcgataatatttatgttgtagtaggtcttttcacattgggaagtgccggaataggtgcaacgttaccatgtctggatgcattgattacagaaggcgtggacaaaaaacagcggggcacaatcacggctctgttcagcagcatgcgattcattggggtatctctcggtccgcctgtcgtttctttgttgatcggttctcatcatttcctgctttttggtgtgctcgctgcgtctggcgcagtgggcggattgctcaccttatttgcagttaagccggataagggagatcaacctacttcaggaagcaagcagaaacaggatgaaacatctatggatgtgatcgagacgagtagagggtatgtttccataggtcgcaagaaaagtccattttagatagacggtgctgtatgctgcgttcatttccatgctgtcttaagtttaacatccagatctgttcaataaaaaacgcgtttacgcctaagaaagcggatgagtttgctttctcggtgtaaacgcgtttctcgtttctatgagcagaatgactttaaccaatcattcgtgtttacttttattcgactggctagttttggtgttgccggctccagattctgaattcttggattgatcttgaggtgattccgttgcagtaatatgagtatgagcgagcagagcatgaggttcaatggagaagctgccgcttcgttttccctgaatcagatatataagtaagaacagaatcataaacatcacggaatatcgatacatatcggtataactggttatcgccgcaatggcgccaagaagaagggcaccggtcgcaatacccagatccagcgagttcaaaaacataccattagccatacctcgttgagtaggagatacaacttgaatcatccaggtctgcagagacgactgcatggaaccataaccgattccgtagataaaggcagcaatgaacaggagggacatggaggttgcatacgagagcagaatgaggccgacagcaacgaatattgcccctggaatgagcagtgcttttggacctttattgtcatagatccgtcctgcaaatggtctaaccaataacacggcgagtgcattgaacaaaaagaacagcgcaggattggccagattggcttccttaccatacaaaacgatgaatccgacaagcccaccataggtgatggataacaggcagttcagcacactgggcagaatcagcttgcggttgaaaggtatcttctgttttgggttggaccctgaagcacttgttgtggcttgtggcatgatggttgtactgttatcggttcggactgcttttttgcgtgtcagcgaataactcagtggatagatcacagcgagaacacccgcagtacataacatcagggttacaaatccagcaccctggagcagagtaaccccaatgattggccccatagacatagccagactagttgatagaccaaagtaacccataccttcacccattcgtttgacgggtacaatgtccgaggccatcgttggaaaagcggtactgctcataccaaacccgataccaaacaacattctgagcaacaagagcacagctataccggcagcaaaataatagccgagcgttgccagcagggctatggacaggccgatatagatcatggcgttacgaagacccttctccagtgctttcgcggaatagagacgggctgctatggcacttagtgcaaacagacaggtgaataaacttacttcaaatgcattggcgtgaaatcgctcctgaacgtaggacggaagcggagagacgatcatgtgcagttgcaagaacaacaagaagttgcacagcatcagcagaataaaatcggtagtccatagtctaacttgtgtagattgttctttcatgatgatgtattccccctgagttgtgattcattacaagttgcggttaatgagggaaagagtatgtttaaatgcttccatctggtcttcggatataccttcagcaagttctttattcatttctctttcaatcggaacgaggatatcaattaacgctttgccttccgtggtgagatataacagataggctctgcgatcctgttcgctggtccggcgttctacccagccttttttctcaagcagatcaataatccgcgcagtggtaggttggtctttaaagacacgtgcggcgagctccttctgattcacaccttcaccgcggtcaacattaaagagaacagaaaattgctctgtcgtaatatcataaggtttgaaccgcgttgcaagtaaagctacagctttacgatgtgtgaaacccagcatgaatccaacagattgttccagtgtatagtccatgtgattgccagacctcgctttcataataaaatgtcccaattaattagttgttataacaactatatgtcaaacaagtatttttgtcaaaatgaaatattctcatatcgaacttacgtgtacgctgtgcaatgatccaaaaatactgttagaatagggatgaaaccgcttttatagaatccatgtctagcgtgcttgaagaatggagaaaaccaatttgctctaactgatgttggagatgaccaaggagagctgtgtatgctaaagaatatccccccaataatacctccagagttactcaaaatcatgtccgaaatgggccatggagacgagttggttctggcggatggcaatttccccgcagccagtcatgccaagcgactggtacgctgtgatgcactgggagtcgttgaactgctggatgccatcctgcaattatatccactggatacctatgctgagcgtcccgctgctgtcatgcaggttgtgaaaggggatcaggtgatcccgatcatatgggaagactatcgccggttgattgaagaatatgaaggcatcacggatgcttttgatcatgaagagcgatttgatttttataaacgcgcttcgaatgcctatgtgattgttgcaactggtgagcgcgcccaatatgccaatctgattttgaagaaaggcgtcattttccccgatgctgatcctggtcaggaacagcagagtgctgaatcgaactgaataattaaggcgacggagcagtggatgctttggtcgcctttttatttttaccattgcggatccagtataccagaacgtacagaatgggcatggattcaataagtaccgtgtacaaaggtacagcgtaagagcggatagccaactcgtaagaggcggcatctctggcatattgaagcacgatggcggcagccgtccccccaattagatacacgaccgatttttgctgcctgatcccgctgagtttggagagacagacggaagcgacatacaacagaaatgagctgcgagtgaacatcgttgttgaccaaattgcgatcagaacagggtccagattatccaggaaatctccgtatcgcgcaaaccgtaccatttcaagtaaaggatagcgaaggccggcggcaacatacggaccaaaattcatcatcgtgaacatccagaacacaacgatgaatataacaacggtgatgccggcaaataacatgcttttcagcataggacgcctgaaagcaacgaccggtgcgaggaagaggaaaaacatccattcggagaaccatggcatggtggacaaagaacccatcatgatctcacccagatcatgatgggttgccattgcaagcagtatgccgggattacctccgcccccaaccgccggaataagtaaggtggaagtgaaaagctgtaccagaaaaataccttccgacataaatacaatcgtaaccaatcctgaacgcgcagtcaggcagatgcacagcaaagtcagggttgatgttaaccaaatcggagtctgtggcagatacatcgattgcaggaagataataaaattctccacatcaatggataacaagtagatacataacattacaattaacccgatataaaagcgatgcacaaccttgcccacgatatcctctccataggaaatccagggtttgtcggggttaatggaacctaaacggtatgtaaagaacagaaaaatcagactgattaaaaagccgccgatggtggataaccatccctgatagccactcattttgaacaaacgttgcagaagaaaggcaacaggttcggaatacaggtaaacaaacatgaagcggtaagcctgccccgcagtcagatggttcatcgttaatctccttccttattgaatcaagtgatcagcccagccaaagaccaattggattacatcattgggattaggccatgctgaccagcttactgcaagtgtattccatacgagaaataggccgagcagtatgaaataggcacgtctgattgcttttttgcttgtttttacagatgaccaatccagtaaatacagtcccgcaaatactaaaacggctaacacgtatgtaacctccttaaaaaagccattcccgtgcaaattagaagcttgactccgagccgacaaattgaatgttgatatttgtgttgacggtatactgaagatcgttttttacatagttgatccatgtaggccgcagcttcttccagacctgagggtatctccattcgagcctgtatccaagcatgagtatatcggatccttggtgtttcgcggtttggatggcctgagtaagatgagcactcactttttcattggctgcttgttcaatgtccttaataccaacgatatcttcagctttcagaacaggaatgaccgaattcaactcagctcttccggtcaggttgataacaaaatgtggttcaccatcctggagctttacatgtatatccgagtgcatacggtataacttcatgcttgctttttgttttttggttttaacggaaatgatcattgaatcgaggttttgtcctgcccaggcaacagcacgtgcttcatcggccgagagagtcccaaccattcgcatctgtctgaagatcgttccaccgatttgactgacccactttttggattctccctcttcactgaccatgttggtttttttgctgcctaacatcgatgaggcaaatccctgattcattttatcggatgtaaatacgcttaacacctgggtttttagcaggttttcctctgtggagaactcccgcagcacgtcacttggcgtttcttcaaatacaggagtcagatcagaaacgtccttggccctgccattcgcaaccatcacgtagctgctcaggtggaaaagaggttgacgtgaaatccattccatcgtgtcttcaattccctcacgtgcgtaagcttggccaaagacaatcactcgcgtatgtccccaggatattttacgtgtcaggtctgtctgaattcgctctatcgcatctgcaattgtcggtgccgttgccgaaactgctgcataaggatctttgcctgtacccccaccttcaggagatagacgattggggagcggcatgctaagtgtgacttcgatctctccaggggtatccgctttgtccacgtacaaggctgtaatgaaggtgcgctcgttaatttcgactttcgaccagcatccggtacataacagacagcaaataatgacgaccataattggaaggggaggccatcgaaatatcatggtgtatcctgcctcctttcattatcggtcgcataggctttggttcgttttttcatcatgaaccagggtacccgaataaacgtatccttgaaatcacgcaggacgagtggggcaaagggctgcatgtacggaacaccaaatgaacgcatgctgaccatataccagtacaacaggtagatagaaatgactacaccgaataggcccagtgttccacccatcagcagaacaggaaagcggagcagtcggaaggccagtcctaactcgaaatgcggaataataaaggctgcaatgcctgtaatggacaccacaataaccaaaggggcagagacaatacctgcctgtacagcggcttgtccaatgacaataccgccaataatagaaaccgtctgtccaagcggcttgggaatacgtattccggcttcacgtaatccttcaaaggtgatctccatgatgaaggcttcaattaatgccggaaaaggaatgttctctcttgcggaggcaattgtaatgagcagattggttgggatgatctcgggatgaaatgtagtgactgctacatatacggagggcagcaggaaagcaataacggcaaacagcaaacggataattcggataaatgaagctgagtggaaccgctgataataatcctcggatgactgcatcaaagagaaaaatgtgactggaataagcagtgagaagggcgttccatcctgcatgaccccgatccgtccttctacgagagcagctgcaacggtatcgggtctttcggtatattgatactgtggaaaaggagagagcggatgatcttccagaaattctgatagatagctgacacccagactgctgtccatatcaatctcacccagactgattaatacattttccaaaatctcaggtttgcataatccttgaatataaatgacaaaaacttcagttttggtatatttgccgatggtgaatttgatcattttaaaatcgggatgtttgattttgtgtcgcagtagagacatatttacattaatatcttcgataaacgcttcctgggggccaacaacgacgacttcatttgttgattcaggtacggagcgcttctgataattttgaattgaaaaaatgatcatgccagacatgccttcgatatagagtgctgcattaccggttacgatatcatctaccaacgtttccgctgaatccctgtgctggtttttgagagaaaaaaaggttccactcacaacttgcgttatgaaatcgggaccgatctcgttccgtgcagcctcctcaagcaagggcttaacaatagcttcacgcatgatctgtgtatcaacaatggattgaatatagagcaaagtgcaatggagcggcccgatctgaaggggctgatagatcatatctgccacgccgactagacgtgattgcacctgtatcagaatgctttctttcatagatcccttcctcctaaatcaataaatggttcggtcctttgtccgttatgagcgatactatagtgtgcaacgcttcgactgaaatatactccgaacgatgaatgttcggtatctttagggaaaagttcctggatactacaaattttgatgcagatgatgaatggggaaatggaaaggactgttatacaattgaaagaaatacaaacgaagagacgatggtctccattccagaggagttgagtgaaatgcagcacccaatcagacaagcggatcttcctgattgtaacgaagtgggacgtttgtttaatgagtacaggatgttctacaaccaaaatgctgacattgaggcagcacgtcagtatattagagaacgaatggaacgccatgaatcggtgattttggtagcagaaaagccaatctcgaatgacttaatttgcaccggattcgttcagctgtatcccagtttcagttcagtatcgatggggcctgtgtgggtgctaaatgatctatatgtgcatccggattatcgtcagcaaggcattgccaggaagctcttgcaagcagccaagcaattggcatctgagcgaggggttcttcgtatatcactctcaactgagttaagtaacaaacaagcgcaagctttatatgaatccgaaggatatgcacaggataccaaattcatgtattatgaacttaatgtataagaggttgctcaaaaagacgcactatatgaatgaatggcacactcgtgtcgtcggcaacaagggaggggagtcgcaacatgatgcagtggattgccatgatcacgatgttaattgatcatataggggctgtcttttttccacatattatagaactgaggatcataggtcgtatcgcttttccaatctatgcttttgcagtgtatatcggttataaacatacacgcgacgtacaaaaatacatatggcggctgttctggatcgcgatcatatcacaggtaccgttcatggctgcgtttaatcattattctctgaacgtggtatggacattgtggtcagccctgttggtattattcgttattgataaattgccatccaaactactggggattccgattgtcattggagcaggttggttcatggaaattagccatatggattatgggatgtacggattgttattggttctgttattccgttatttccagggtcctgtacttgtcgtggcacatgtcttgttaaatgcactatatcttctgctgcataacagctctgtgcaaatgtatagtgtgctcgcaaccgccggcattgctattgctcagtattaccaagcgggattccgtatgaaggggccacgttgggtctggcgttatttctatccagcgcatcttgccatcattgcaattatccgatgggtctaaaagaatgatccaaaaatgcaaagaaaagaagccatcttatcgtcagtgaatgacgatagatggcttcttttcgtgtgaccttatttattaataaatgctgaggatagagtgaacttactccattgctgtagaagtgcccttatggtcccgaattgcggcggggaagtacccaatatgaacagcgtagtctaacatggcggagatgaagcgatcatctgttctcgcacatgagataccggctggttccacataagccgttgtgacagggcaggcatagacataagctgaatccttcgcaccgtcgccttcaagctgtgcaatagccaactgaagagcctcaggctccttgctaatgctcgcatcgaacaaccaacgtgtgtaatccgcaaaaggtagcgtttcgacttcataaccagcccgattcacagaacggatcagctcatcataacggatgggctccggattacagatgtggaatacacgaccggctgtatcctgacgtaaggccagatgaacgatagcttcacttgcatagttaatcggtgtaaaatcaaccatccagtcagccgcaggagccttgccgagcaataacatcgctttgatcatacgataaaaggcgttgctatcaatattggactgaaaacgtccagtttcggagtggcaagtgagattacctgcacgatagatgctgacaggtaccccttcctctgccgcaatcatgagcactttctcggcttcaagcttgctgtccgaatacaggttgtccacatgcaagtcagccgggaaccgatcatattgcagggaagattcccattgtccgctgagtgccaggtcttccggaatacccatcgtggatacatggtggaaggaagcacctggtttgctgcgaatcaagtctaacaatgcgaccgttccttccacgtttgttttggcgaactgatcagcatcgccgaaatgacgtacgtctgcagcgcagtggatgacacggtcaattcgatcctgaacataagccgtttgttcagtggacagaccgagattaggttgttcgagatccccttcaataatctccacgcgagtggagagttggtcagtcagttgtttgccgaaatagccttccagcacgttagtcaaacgttccattgcagttattccattggatggtcgacgaacaagggtgtagattcgtgtactggaattcagaattaactgttgcagcacatgagagcccagataacctgttgctccggtcagtaacacatgctcaggttcacgaatgagcgggtaccccaactgggatgttagctccacaggatgttcggataattgtgtaatcattccgtcggtcaccactgaatccgtaacttctgcagcacttagagacaatacttccacacgacgagcgagagcgcggactgttttctcggcaaagaagtcggcaattttcagctgtggataatgtggcttcagaataacaagtacatgaatgacccggagtgaatcaccaccgatattgaagaaactgtcttcgacaccaaagtcatcgtgctgaaggatttctttccatgcatccaggataagggattccgtctccgtctcaggcatgacccgatcaggacgatcttcatgtcgttcaacatgaggcagggataccatcgctttgcgattgatttttccagtcggtgcaatcggcatttcatccagctgacagatccactttggtacaaaataagaaggaagtttctccgtcagttctgccttgatgtccgaaacagagagggtactgccatctttcgatgtaaagtaaccaaccagcatattttgtccatcggattctttcttcggaatgacagcaacgttctggatctgatcaagccgtgcaaagtgatcttcaatctccccaatctcaattcggtgaccacgaatttttagctgagagtcactgcgaccgacatattccagcaacccggtatccagcaatttggcaatatcgccagacttgtagattttctcacccatcgcaaacgggttctcaatgaatgcttgctcagtacgttctggctgattcagataacctttggccagtgcaggggtagcaatatatacctcaccaggtacacctgccggacagagttgttgttcttcattcacaatgtatactttgtagttatgaatcggtttaccgatagggatgttcaccacatgttccggaacctgctcactgatgcggtgagtagctgtggctactgtacattcggtaggtccgtacacattaacaatatcaatctggtttccaaatttgcgctggaaggcacgaacctgttctccatataacgcttctccggctacagtaatgattcggactttggccagcttgtggaaaccttcatcggataagtaggaagcaagctgattgaagaaaatcgtaggcagtatcgtaatgatgtttgttcctgttcgttcaattgcacttgcgaattcttcaacggatacacgttcttccgcagacaatagatataattctgctccatagaacaaggcgccaatggtatcccacacggatgcatcaaagctgtatgtagcaaactgggttaatacatcacctggttgaatgtcacaatcacgctgaaccacactgccaagattggttacaccccggtgggcaatcagtgcacctttgggcttaccggtcgaccctgacgtgtagataatatacgcaagatcgtctggctgaatatccagattggggttacttgctgcaaatccggctaaacgaccatccacagcgagaatctgacgtaccgtagctatactggagaacaagctggaagcttgggcataagaagcctccgttgtcagcacgaatgaggacgccgtatcttccacgatataactgttacgttcttgtggatgctcagggtcgatcggaacatatgcaccacctgccttcagaataccaagcagggagatgatggtctccagacttcgatccataaagatactgacgaattcacctttctgcaatccattggataacagaacacgtgcaacctgattagctcgttcattcaattccctgtacgtataacttttggatggcgatgttatcgccggtgaatccggatatgccgctgccgttgcttcgaaccagccatgaaccgtctgattctctggttcgagaacagaagtatcattcatttcacggtaaagcaatcgatctgaggcggaaagaatatctaccgtaccgattgctttctcaccgtcacgcacaagggcgagtagaagagtctgataatattctgcatatctcagcacggtagactctttcaacagtgaactatcatagaacagatcgaggatgagcatgttctgatcatctcgaacgttccagtttaatatttgaggagcttgaggcaactgtacactattcagcataaaaaacgattcagggtatccaccgttttgcaacgtgtattcaatcttgagctgctctgacacctgatgacatagttggctgaaggttaattttccctgaatctgtaatgaaagataggaagctgcctgatcgggggaaagtatacctatggcaagttcctgttcagctgacaatcggaataacaaggctgcataagctgagaggagtaccggatacaccatctgttctccatacttctgtttaagttcacggctcagagaagcatgtaatgtgatttgagcagactgataagagaatgattgttgacgtcgcccaaaatccagtggaatctgcagaactggcaagctagattccatggaatgggaagaagatggttggttttcaatcacttcagttattcctccttggttcaaaccgaatgtttgtggatttgaattattgtttgcttacattgaaatgagagatcagttcttggagttcctcagacatgctgttaaggcgtgtggaggagtctaccagtgttatcaaagatgctttttgctcatcaacagatgaggaaatttgttcactgctgtttgctgtcttacttacgcttgaagacaagtcatctgctgtagcggtcatttcctccgtacccgcagagatttcctccgtcgcgcttgatacttcctgaatctgattagatacttttttcgctgcttctaaaatatcttcgaacagttgtcctgtttgatcggctacgctgagccctgtatctacttctgacgtaccttgttccatagcacgtacagcttgtttaattccagcttgaatctcttggatcaatacgccaacctggctggttgcttgttcagactgctcggcaagtttgcgtacttcacctgcaacaactgcaaatcctcttccttcttcaccaacacgagctgcttcaatggatgcattaagagcaagcaagttggtctggctggagattcccgagatgatattgagaatatcgccgatttcctgtgaacgactctccagaacctcaatggcagaagcggtattcttaaccgattccgtaatcagattcatctgttcagatacctgacggacaacgctgttaccttgttgcgaacgacgttccatctcataggcttcatccgctacacttgccgagctgctggcaatcgtctggattacggtagccatctcggacatggcacgcgcactatcccgggttgcctgttcctgtgaacgaatgttggaagtgatttgagtcacattattattgatagaatctgcattctcactgttgcgctcggaaacttcatatagttctttggcagactgatttacttcttgtgatgtgatttgcactttaacgatagtatcgttaattttgcgaaccatggtgttgaacttctcgttaacgagtcccagatcgtctttgcctgtcggaatgttgacattcaaattaccccgactgacgtcatcaattcctttgatcaagtgacggataggggaaagtgtgtttttaactacaaggtattggataatcaggaataacagcaagaaggccacaaggatgataattccgtttttgagcaaggagtttagtcctgcgggtacggctgatgcatctgcatcaatggcaaaatatgagaaaatcttaccgttgctgtctttgattggatatgcaatggttgtccatgttccgaaatcatcggaataaaatgttgtgaatgttgggcgatccgtattaagcatttctttcagtgcattggctacaacgaccggttgctcatacatgtcaccaatatttacgttctcactttgaaaagcctctcttaggttggtcggcatcgctacaagggaagttaatctcttgttatcgccaccgagctcaacaccgaagatgtaggcttgtgcaatgttaggataatattcttgcatctcatcgaaatacgctcgtaatttcgtttgtgttgctccatcataactaccttccgcaatagcagcttgtacctcggcaggattgatatcttcagcccactttttggtaatttgttccacttgtccgtgcagttgatcaacaagaactgttttttgaaaatagtaactgcttgcgataagtgctaccccgatgataatgatattagtaaatgagagtaacaaatttttggagaaaaacgacatgcttttccaacttaatgatttcactaaattccactcctgatcttctttaaattaagaaactttagggttgctttggtacagtgaacttagatcattccgtgatcccctccaaaggaaatttatgcgaccatggtcttggtttatcagtcgctttcgtagagacttatgtaccgtatgaaccataggtgtctaattattaaaacacatctataattaatatgtcgtataaaatgtcgttaaattgaatagtatcgttaaattttttttaatattttacgtatttatggacatatcagatggtttataggtatttagaactgtttattttaaaatttcccattttttagcttcattctgtattctataacatggtgggtaaaaatacatccttcaacaaaacaaaaatttgatggcaaagatgcaacagaaggcacggatatacatcggaagcggttttatctataataactacatatgcatttctcaaattatgagcagcgggggtttatagatgaatcttaaacagatagcagcagagcgtgcggcagaatatgttgaagatggaatgaaggttggattgggtacaggttcaacagcttattatgccatctgtcgaatcggtgaacgggtacgtgatggattgaacattcaagcggttgccacttcagaggcttcggacaagcttgcccgtgaatgggggattcccatcgtcccatttgaccagattggacgtctggatctgaccattgatggcgctgatgaagtagatcccgaatttaacctgattaaagggggcggcggggctcttttgcgtgagaaaatcgtagcggccaatagtgacaaattgattattgtagcggatggcagcaaagccgtgcaaaagttggggaaattcccgcttccagttgaggttgttccatttgcttctgagtggaccttccaggcgctcgaaaaattggggtgtcaaccgcaatggcggatggatggacagcaacgttatctgacagacaacggaaacctgatagcagattgccacttggaggcgattgatcacgctgcggaccttaatgttcaattgaacatgttaccaggtgttgttgataacggactatttgtggatatggctagtacagtcattcttgccaatgcggacggaagtattgaagagcttcatcgttcttaatatggaagagggtgcttttcatcgtatgaaagaactgccaatcgttgatggtgaacttgtactcaggtgtgtggagaaacaggatctgaaagaactctatgaattgatctacagtgatgacgtacctgaatggaagcaatgggatgcaccctattacccacttaaacacgaaagttatgaaagttttgaacaaggtatgctcaaacgtatgaacgttgatcctggtgataccaaacccgtatcaatccgtattattgaatccgacagacaaattgtgggtacaatcagctattacatagaagatgagttatccatgtggctggaaatggggattgtaatatacagatctgtccagtggggacgcggggttggcacacgctcacttgtcatgtggtcaagtcatttgttcgaacagatgcctttggttcgggttggattgactacttggtctggtaatgaacgtatgatgcgtgcggctgtgaaagccggattacaggtggagggacgaatgcggaagtgtcgtatcgttcgcgggcagtactatgattcaattcgtatggggatgctccgtgaggagtgggagcagaagctggcccctcatacgagccgaaatgtaaacaattgatggaggattattgaaatgctgaacacggaggacaaccgggaactgtctttacaattattcgtagttcttgttcgggcctacaattctgtgacctcacgttccaatcgggacatccagagtcacggactgaatacgacagaatttggtgtgcttgatttgttatatcataagggaccgcaggcattgcaaaagattggtgaaaaggtgttaatgtccagtggtaatattacgtacgttgtagataagttgcaaaataaaaatctgctgtttcgtcgaccatccaaagaagatcggcgtgtcatttacgctgagttaaccgaggaaggaagagaattgttcacacagatatttcctcaacaccatcaggtcatcattgatgctttggaaggacttgacccttccgagaaagtggatgcgattaagatgttgaagaagctgggattggcggcagaagggaaaactgacttgcgttcataacgcaggtcagttttttttgtagatctcgaaaagtacaggcgtatactggctgactggcttgcaaggccctccataatataggaagattgttctatacattcatcgtgtgtaaaacatgatcatcgaaagttcatgtataatagaacagaacgattaagagcggaatggatggattggatcaagtagaagaacctatcccgattgcaagttagctaacatcgatctcattctggattagtcacgaatgatgatggagatgtgatgcgggtagaggagaggtgcatctatgagtcatcaagaagcaggagaacgattgctccaagaatctgcgaacttagctgataaaataacggagaaacagtatctcagacagcccgatttacttgagcgatttggcgagaatggaaaaatgcgaaccaaacaggattcggagtatagcttgaactatttggcagaaagtgcgctcgtacagagtccaggtctgtttactcattatattgcctggctgaaagttctacttgagggttataaggtatcaccagaagacctggcaattaatctcaatctgatcaaagagacattggaagaagaatttgactatccgtcaaaggcatttttgctcgagtatctggagatgggaatatatagaacaacacacatggagtcacaggcgggttacatcaacgaatccatgccatatggagatgccgcgcaatcgtacttgcagtgtttgcttgagaataaacggaaagaagccttcgagatcattgaagcccagttagaagctggggtgacgattcgtgatatttatcgatatatctttcagcccacccaatatgaaattggacgattgtggcaatgccatcgtatcagtgtgggacaagaacacttttgtacggcagcgactcagtcattcatatcacgtctttattctcgctggttgattcatacaggtcaggataaaaaactagtggctacctgtgtaggtagtgaacaacatgagatcggactgcgtatgctcacagatgtgtttgagatggaaggttgggatacgcactatctgggagccaatgttcccaatggaagtgtaatagaggctatagagcggcatcagggcgatgttgttgcgatatcggttacgatgacatatcaccttcatctggccaaagagttgattcatctgatccgtcatcatccggcaacggcacatgtgaagattatggttgggggatatccctttaatattgatcaggagttgtggaaaacgataggagctgacggttatgctccaggagccgatgaagcggtagcggttgcagaacaattactggctcagccagctacatgtaatcagcttgatatggttagggattaagagagggatgatgtgatgtctaatgagagcggagagatacagaggctacgcagaacgattgagcagttatcggatcagatgattcggagtaaagagcaagaggaacggacacttgcagaattctcggatatgaataatgaactggtgacactccagcgtctgcttgcaaagaacaataacagtcttgaagctgcacgtcagcaagcagtagatgcaggtgattcaaaaatcgcatttattgcaggtatcagtcatgattttcgtacaccattaaatggcatattggggatggctgagatgcttaagttgtctcccttgtctgaagaacaggagaattcggtttccgttatacaggatgctgccaaactgctgcttaagctgattcaggatcttctggatctgtccaaacttgaggcgggtcagatgcgacttgaactgggagaagtggatctgcaagagacgataaactatattgttcgtttgctcgaaccccaagtcagaaagaacggaaatcagttatcgatagactgtgaccccagaatctctactcttcttgaaggggatccaacgaggattacacagatactgatcaatctaattcagaatgcgaacaaattcacatcagaaggtacggtgcggatacgagtcacccttgtggaagatgatgaagttacacaaatgatccgatttgaagtcgaagacacggggattggtatctcggaagaagatcagaaccagttatttcaaccctacatgcagactgaacgaggacgctcaagtgagtatggaggaacgggccttggattatcgatctgcaggtcgctcgttacactgatggaaggtcggattggagtagacagtcaggagggtgaaggatcaacattctggttcgaacttacacttggtaagaaagacggtaaccagtccgctaaccagtctgttgcttccgctcaagagcaacaggggcaggatatggatgatgaagctccttctgtatctgtattgctggccgatgataatgtcatcaaccgacagcttgttatgttgcagctcaagaaactgggaataacccaagtggacgctgtagtgaatggggaagaggcaatagctgcttttctcagcaaaaaatacagtttgattctcatggactatatgatgccattgatggacggtttggaggcaacacgcaaaatccgctcgatagaaatggatgaaatgcgccataccacaccaatcattgcaatgacaggtaatgtcatgcagggagagaaagacaagtgtaaggaagccgggatgaatgactttattggcaaacccttcacgctggaaattctgagcaagatgatcgagaagtggcagcaatcctccgaaccgaccgaggtactaaatatgagcatcatacatgagattgcggaattaaacaccgatggcgatcgtacactccttggtatgttgttggacatgtatcgtaccgatacacctggcaaaattgaggcgctgcgcagacatattgtgtccggtgaccatgttgctgcaaccgaggtagcccatgatctgaaatcagggagtttgagcctggggattcgttatttatcaactttgtttgcccggatagagcagttggcgaaggaaggtcaatcacggaaagcagaacctttgctagatgctttgttacccgcctatcaagcagcatgtgtagcactgcaacgagtaagtaaagattgaatatatcttaataaggaaagagggtagggctcgttcatgttattctacgtacttgcagcactggtactgatcgttcttgctcttctgtgggcaggagggctttattttttcaaaacggccattcgccgtacagcaaaaacgtttttggtagataatccaaatctgatgcctgaaccggacaatgaaatcattagcagtgcttctgacctgaagtggctggatgctcagcctacagaagagatatctcttcaatcacatgatggattaaaactgtatggtacatggctcggttccaataaagggtcggatcagacggttattctggcacatggttattcgggtagaggcagagaaatggctggatttgcccggttttatgcggaaaagcacggttataacgtactcatgccagatgatcgaggtcatggacagagtgaaggtgatatcattggttttggttggttagatcggaaggattatgtccagtggaccaactgggtgcttgaaaaagtgggtacacaaggggaaatcatattgcacggcatatccatgggaggagcaaccgtactgatgacaggtggtgaagttctgccgattcaggttaaagcgattgtatctgattgtgcgtatacatccgtggaagaagaactgacgttccagttaaagcaattatacaagcttcctgcatttccgtttatacctgtcacaagtctgatctcccggtggaaagcagggtattcctttagagaggcttcggctctcaagcagcttgccaaagttaacattcccgtgttattcatccacggagaggcggatacgtttgtaccaacggaaatggtgtacaggttgtatgaagcctgcccaaccgaaaaggaattgctgaccgtcccccgtgccggtcatggcacagcgtttcaagtcgatcgcaccggatatgaggcggcgctggaatcctttatgaagaaaaatctgtcacctgctgttaattgatttttttgtgacaatctgggtattaagtagaagatgcaaatcattttctaaacgatgggggtatcttgatgggaaacgaacaatttgaggctgcgcgaaaagcagaggcaggttatcattccaatttctatcagaataatgaattattcgcctctggtacctggatgtcgaggcccatgcctatggtgatggatatgctggaacgtctacttgctcacaaggaggaattgcgtgtcctcgatctgggatgcggagtgggaaggcatacgataccgattgcacagcgccttgcaaaaacgaaaagtgaagtcatcggtgtggatttgctggatgaggccatagacggacttcgcaagtatgcgaaagaatatcaggttgatcatatcgtacaggcagtgagagcagatgttgaacattatgctgtggagccaaactattttgattttattgctgcatgttcttgtctggaacatgtctcaaataagcaagccttcatggaagcgatagaccggttacaggccggaactcgtacagggggcattcattgtattacgatgagcaccaatgtggaggaaaaagaaatcaatacaggcaaggagattgaaccattaattgagctgaacctgcccacagccgaggcgattgctatactggaggatgcctacaaaggctggaatattctgcttcaggagcatgttacacagacgattgaagaggaaaagtatgatgaaccgacacaattccgttgtgaactgcttcgttttgctgtacaaaagcaataaattctctgccgggacctgacaatggacccggcactcttaatgtgtggtcggaagggagatcgttaaggatgaatacatatgtaatagggatggaggagggaggcacacgcgtgtggctgtcgcagatcagaacgggaagattttatcctatgtgcaaaagaatggttgcgaccgctatcacgatacctatgctgagcaaaatgtgctggagggtatcgctgaagccataactcaggctggagtccaatcagatcagattgctgccattcaggcaggaatggcgggtctgaatcggcctgaagatacagtttgggcggaggcattactcgctcgtacggggattacaggcaggatcagtgcggtaaacgatacgcacatcgcacatacagcggccttcgacggtgagccaggtattgtcgctattggaggaacaggatctctgatccttggcagaaccgaacagggagcttggctccgcaacgatcagttcggtcattatgcgccgacagcaacacgttttctggcttacgacacggttcattccatattggctggacgttatgagttgcaggatcaagaatggattgagcaggttttaacgtattggaatgttgcctcaattccagagctcgctgcgctggggatagccggttttgccgaaaataaacaggcgaccaaccggaaatttggtcagatggcgtctatggtgactgaagctgctgatcggaatattcccctcgcagttagggtgtgcgactcggctgccgatacggctgttgtgggaatcctcatgctggcatcctgtttcgatcagcccacagtgtccatgacgcttaccggaagctgtctgagttcaccatatatggtggaggctgttcagaaaggactggatgctgcctatatgcgcgaagggaaaagaattcaatacatacccagtaacttgccggcagttgggggcgcactgttggatgcctatcatttggcgcagatcaacgtatcggataacatcccaactgtgcttcaatcggagctgaatcggcacacgacttgaacttttagaggctaacgactacaatacgataacggaaacaagcaaggtataggaggaattaaggtgttaattaatctgaaatcacgcatacaggagccggaagtacaggagctattgtcctactcggtctttcctgatccggatcacttgaaccgtgcgttgcaacaatatgtagagaaagacgaattgcaaatgggcggttacgaagatgagaaacaattgatcggtctgattggatatgagaagacaggaacaagtgaggttaccattcatcatatctcggttttgcctgaaaaccgctttaaaaattatggacgtggtatgatctcacaactgttggcaacatacaaccctgatagactgattgcggagaccgagctggaagccgtcgagttttatcggaatacggggtttgtggtatatagtctgggtgaattatacccaggtgtggagcgattccgttgtgtgcttgaaaaagaggaagatacggacgaagagtagcacagagaccttttattactttaagaaatatatggattatcattagtacaggatgttggatttggcaatgagctgagtcggacgtcctgtttttttgtcgttttcatctaaaaagcaggaaaaaagtattgctttgtaatattgtttcattatagaatagtttcacagaagaatagttcgttaagtgaactatatagatttgggaaaggagaatgaagaatgagtacaccggatgcaaaaagtttggtgaaccgctatttggatgcttcctttatggtcaataagcggtttgatacgcggatacgcgaacaagtggggcagaccataacgaccgatcagttctgcgcacttcgtctgattgaagagaaacctttctgcacgccctctgatcttgcagagcttctgtgtataggcaagagtagcattaccgctttggtcaacaagctggtggatcgcgatctggtccatcgggccggggatgaacgtgaccgtcgcgttgtatatctgacactgacggataccggacgacaggtatatagggaaacagaacaggaaatacagcagattctggagccgtatctggttcattttaaaccggaagaagtccggattttcattgaatcttttgagaagcttgcagctttgctatcgcatgaaggaggacgggagaacgaatgagaacgatactaaaagcaagatggtggttaatggggctatgggttgttgtagctgccgtgttgatgtttaccgcccctaacatgagtgaactgattcgggaaaagggacagttttcggttccggaagggtactcttccacccaggcagcagcgattctgaatgaagctgcagcacaaaaaggagaacaacaggggagccagatcgcccttgtattctataatcccgatgggctgggcaccacggggaaacaagaggcagagaaggccgttaagcaattggaggccgacaaggagaagctcggtattctgtccattctggaacctttctctcagcctgaactgtccgagaagatgatctcagctgacggaaaaacgattctaacatcgctatccattgatcagggagatcgtacggtcaaggaaatgcgggaagacctgaatgaagcattgaagtccgtcaatgtggagcactacataaccggtaaaggtctgattgatgaggacaccattgaaagttcccaagaggggcttaagaaatcggaatatattaccgttgtctttattttactcattctgttcctggtcttccgttcgtttgtagctccgtttgtcccgctactgacggtggggatcagttacattgtatcgcaacagattgttgcatttctggtggatgggctcgacttcccgatatccacatttacacagatctttatggtcgccgtcatgtttgggattggtacggattactgcatcctgttgatcagtcgcttcaaggaagaactggctcatcatgagaatacgtgggatgccatcattgccacctatcgtactgccggtaaaacggtactcttctcagcactagctgtgctggttggattcatagcgatcggatttgcccagtttatgttgtaccgttctgcggttgccgtagctgtaggtattgcagtgatgatgcttgccttggtgaccatcgtgccattcttcatggcggtgttaggcaagaagttattctggccgtcgaagggttcacttgaacatgccgagagcaagatctatggtgcagctggtcgcttttcacttaaacgtccatgggctgcgttgctcatcgttgcagctgtctgtgtgcctcttctggcaacctacgatggcaaactgtcgttcaacagtctcgatgagattggcgagaaatatgattccgtaaaagcatttaacattatctctgacagcttcggtccgggtgaatcactgccgggtcagatcgtcatccagaacgatgaagagatggataatgcaaagtatatggccgttgccgagaaaattagccgggaagtagagaaagtagccggagtctctggtgtccgtagtatgacacgacctacgggtgatgagattaaagattttgaagttacacagcaagtgggaacattatcggatggactgggtgaaggcaagacgggtctggacaaaatccgtgatggcctgagtgaagccagcagtcagctaagtaaaaatgaaccacagttaaaagaagctgctgatggagcaggtgaacttaccaaaggaacctcccagttgcaatcgggtatcacgcaactcagtgagggactagggcagattgaaaaaggtattcgtgatggttccgcaggtgcgggtgatctgaaagccggacttcagcaagccaaaacgagtgcagatcaacttgcgcaggcgaacaatcagttgcttgaagcctatcgtcaggcgggagcaggggtcgctgcactgggggatggaacccgcgaactggaacaacagctgaacggggtttcaacagctctaaccagtctgtccgaatccttcacagcacttgaagagcgttatcctgaattgcagcaagatgctgattaccagcgtatcaaaggtacgattggagaaacaggttctggcacagcgcagcttgctcaaggtttgggtcagattaagaccaaacttggggaagccgctgctggaattaatcaggccaatgaagggtttgcctccgcagcagccggacaaaaggcgcttgccgatggcctgggccagattgtaacgggaatcggtcagttgcaatccggtctcaaacaggctgcggatggtcagggtaaagtgattagtgaaattccttccattcaggatggacttggccagcttcagggtggtcaggagaaaatccaacaaggcttctcggatctgagtggtcagctgacacaactgacagatggactgaatcaaagtgtcgatggtattaaacaggtatccggtggactggattcagcgcaggactacctgacgcaattgcaaaattcaccagattccgatctggcaggctggtacgttcctgatgaagcactgaacagcaaagacttcacacaggtatttgatacgtatctgtctgaagatcggaaaacgatgacgattgatgttattttcgccgaaaatccatacggaacagaagccattgatcgtgttcctgacattgaggcggcagtacatcgcgcggtacaaggcagtacacttgaaaaagcagatatcgccataggtggcgttaccagcacgtttgcagatttgcaggagatctcgaataacgactatacacgtactgtaatgctgatgctggcaggcacatttattattctggtcgtactgcttcgctcggtcattatgccattgtatctgattgtttccttattactggcttatttcacatcgatggcgttaaccgaagtgatctttgttaatatcctcggattcgcaggcattagctgggttactccgttcttcggatttgttatgctgattgcacttggtgtggattatagcatcttcctgatggaccgtttcaatgagaacaaaggtatgaaagtacaggatgcgatgttgtacgcgatgaagaacatgggcaccgttattctatctgccgcagtcattctgagcggtacatttgctgcgatgtatccatccggtgttctctcgatgatgcagattgccacagtagtccttagcggactgatcttgtactctctgctgttcctgccattcttcgtcccagtgatggtgaagatgtttggccgggccaactggtggccgttcccgaacaaggaacaatcagattccgttgattcggatcggaccataggcatgtaatgcattgcaatgaatcaggctctgccgcgttatgcggcagggcttttttcttttttttacctctacagaagaagaaatatggttttatgcaaaagaaaggtgcatgcctaaggacaccatcccgcgccttgtcttgccactcatcataagatatagagcagttcattattgttcagagaaatcacagcagagaggggcgacgggatggtatatcgatatgtggctataggagattcattaacggtaggtacaggagcgttgctgggcaccggctttgttcctttatatcggcgaatggcagaaatgaatgttcgtacgtttgtatccatggaaaatatgggcgtgaatggactgacgtcgggggaaatgttgcagatgatctcttcgcatccccgagtgcggcaatcgctccgtgaagcggatatcattaccatatccattggcgggaatgatctgattcgtacgtttaaagcaagtaatggcattccaaatgccagcaaaatgacacaggtgctcggagaaacccgcagtaatgtatctcagatcatgcggcacattcggcagttaaagggcaaccatgagtatatggtccgatccatcggattgtacaacccatatccacaagcgacggaagctgcatactgggtgcgccaatataattcgtttttgaatggagccggatcaggcaactatgcgtgtgctcaggtctatgacaggttcgaaggtcgtgaacgtgaactgttgttctgggatagagtacatcctaatgcaagagggtatcgtgtcattgcggagcagcttaatcggacgggatattacccgttctcttgatcactttggaacagaactagaccaagcgatggacttcctttaagataaataaaagacagttccattttgtgagataaaggggttaatttttggtgcaaaacatcgattccggttccctccatccttcagagcagcagcgtatatccgaagtgttggccttatatggtttcacatcggactggaaaggcgagcgtggaaagggtgggatgaataattctacttacatgctccatgtagacgggactaattacgtcatgagacaatatgaaacacataatgatccgatgaaaatcacctttgaacacgaggtgctggcagcccttcaacgttcgaactttaagcttgatacaccttcacctgtaaggcggttatctggtgagggaggtacattccttcctgtaaaagataccctcactggtcataccaaaatcgtgactctgtttcattatagggaaggcgtcaatcccatctggcacacaccagatcaattgatagggctcggtaaagcggcgggggccctgtcttctgttatggctacgctggatataccacttgaacctgtgtatccaccatactatcgaattcaggatgcgtatccgctctgttcaccagaacgattattacagctatgcacatcgccgccggagcaattggccgcatgtgcaaatgagttgaagcaactgagagaggcgctgccagatctgtttgaagccctgcggggtatggaacatctgccgcatcaattggttcatggggacgtgaatgcctcgaatgtattggtagatcagcaggatggtgaaatctgtgccattttggattttgaatttgcgacatgggatttgcgggtaatggagctggctgttccgatgtctgacctccttaccatggacaagagtgaagattggatgtggcaggcacaggagggactgatcaggggatttcgggaacaggtcagcctgaaaccggaagagttgctggctatacctcgattgattttactgcgtagtctggatgtggtcatgcatttcatcagtcggatgttcgagggtacagatgagccggaagtggctgtggagcagattgtgaagctcaaacagcggatcgactggatgcgtcttcatgaagaacgactgcgtgagatattggtgtattaatatcgttattaagaataaagtgcactggtactgctcatacgagggcagagatcagtgcacttttattggttagaaaagtgatatatgaagattacagcgtatagcgaatgacattacaatccacgtttgcggaaccaactgcggacagcccagcggcgctcctgacgttttttgtatttgggcaacgaacgataaacgtttaacgattgctcgtaagcctgcttcgcgtctgaattgcgtccgagggaacggtgaaccgagccgagcagataataagcttcactggaagaggaatgaatctcctgaaactgatgcacataatccagcgctttgtcctcatgcgtatctttgaaagctccagcaagggttaggtacgggcgtccgtacttgactctggggttgatctcgagggcttgcaaaatatgacgttcgcctttttcgatgttacccagatgaagctcagtcgtccctaatgcctcccagtactcagccgattgctcgtatgggcgttccagttcaagcaataacgcatgtgcctcgctgtaacgcttgcgctcaattaacaggcgagccagttccagcttggaggaaacttcattgggactcatggcaagctgttgccgaagccgtgagatgttacgcatacgtttgagaggtttcgtgaagcttgggaacaccccaacgtaacgacgatccaggaaatacagtataacgagtaaaatgaggatggcaatgaacggattacctacaatccgccatagaaggccaaagataagaaatttaataagcacagattcaactccatttatgatgtaatcgcgtttcgtacacttaaaatatatttcgactgatccagcgggttaactcctctgcgtttgcaagtatgattcacatccgcagaacaatcttggtatccggcaaacgaagtcgtaagcactccgcggccgcttgtctcggaacgcagtttcaccggataatccattgaggtggcaagaggcataactccttcaataatacaacgtccgctaccaatgacgggggcttcgaaggttgcccgcatatgtaccagatcactaagggccttaccgccgtattcctccgggaccgtcagccggaactgaagaaggggttccagcaacgtggtacctgttctcgccaatccatccatgattcccataggcgtggctacaacaaaatccagcggatgtgtatgccagacatgatgttccccttccaccagcgtgatgcgcagatcggttacttcccaaccgagcataccttgagacaaggcttccggaattcgtcgttcaacttcattctgataacgtaacagcagatcttctgtccttacggttgaggcatagatcagaccgcttccgcgaggcaaaggttcaatcttgaagcgaaggatggcccagcagggcttaggcatcgtataagcgatgtaaccttctccggctgtacgtggtgtctccttatagatgacggatggcggatcaaacacgacatccaatccgaaacgactcagcaacaggctggataaaatctcaagctgaatggttcccatgaccttgagatgcagttctcgttcctccggcaaccattgcaggtcgagtaaggggtcttcatccgtcaattcttgcaatgctgcgacaagatcggggtaacgtgccgggtccttgccatgtacttgtacggtcagcaaaggcacagccatctgtggcagaggaggtacaccttcaggattgccgataatgtcacccacatgtgtgtcactcagtccatacagcgcagcaatctgccccgcgtgaacggcaccggtatccgcccatttccgtccatccatacggcgaatctgcgtcactttctcttcaagctcccgcgtcgaattatggatggtatcccgattgtgtaagctgccaccatacatacggacgtatgccgtgcggcccatcgtacggtcacgttcaattttgaacacaacgccggatacgggagagtccactggttgtgcaggtggaggcagaaatgtaaggaccgtgtccagcaatgccgtgacgccaattcctttgccggaagccccataacacacagggaacatctcaccctgatgcacataccgcaggaatgcttcattcagatccctttgtgataacggagtctcctggatgtaggcttccatgaccttttcgtccagctcggcaagtatctcgaccagacctggaatggaaggtgtgccatctgacagagaatcttgattcgggttccatagcgagtcgatgccatgaaatgaatcttcgtggaactgatacgtttggatttcgcatgcgaaaggggacagggtggaacaaatctgctccattaccgctggggcagacgcaccaatccgatccattttattaatataaatgatggttgggatgcgaagtgaacgaagggcatgccagatggcttcactctgggactgaatgccttctactgccgacagaatgagaatagctccatccattacccgtagcgttcgctctacttcggagctaaaatcaatgtgaccaggcgtatcaatgaggtcaatgatggtgttcttccagatcagagaggtcatggctgcctgaacggatatgccacgttctttctcaatgtccagggagtctgtggctgttgttccgtcatctacacgtcccggactgcggacgacaccactctcaaataacatatgctcggtggtggttgttttccccgcatccacatgagcgaagataccaatattcctgcgattcaattcgtttaacatggaatgctaagctcctctgacaacggaatgcaatgtttccgacaagtaataatccagattatcataccacatcttccatatggaagaatatgtggatatatatgattaggcccaggcacctatgttccagtctggttctattttaacgagaactgttcatggttctgcggtatgctgcgggtgttgtaccggttaattttttgaattgacggtaaaagtggggcaggctgtcgaacccgcaagcatcggcaacggctgccatcgtttcatcaccttgcaccagatgctctttcgccataatgacccttcgtgctaatgcgtaatccgttagagtcattcccgtgtatcgtttgaaggcacgactgaaatgggcaggggatacagaggcgtgctgcgccagttcagggagggacaggccattccgaaggttatcgtcaatatgagagatcgtagaagttagccatgagggacctggagcggatttacccggattcgcaggtcccgcagcttccagacgttccagaaaaatgagcaacagttgcagccttaacagggccgcatgtgcgcttagatgatgaccgagctggaattcggtctgaatattatcaatgagggcggccacctgtgattgctcctctgtgttcagatgcctcttatacacgcgttgtttacgacaacgttcaaacaggcttagcaaggaagaagcagcgcctccagcggtcgatgccagcaagcccgggctgaagaacaatgcggaagatgtgacaggattgcctgcatccggtaaggctcgatgaaccgtgctgcccggtataatgaacagatctccttcctgcatattctcaagtcccgtatcaataaagatgcttccctgaccccgatatacatagataatttcatgccagtcgtgaaggtgatctggcaattcgttctgaggggatttggtatcgctgtacaccaggcggaacggaataccggattctgcttgaatagtcgtacgaacaggtgaacgttccataaagactcctttccagacgatcgtcttcaacgagatgttatacctggtcatgagagagtatatttaccgcaatataagcaatttaatttccttttattgatgatacaatgaatttaaagcgtttacaataaaagggtgcagagcctttgagctgcattcccacagtacaaataatcgatgaggtgagtgtccatgtcggcaagcacgaaacggccaaggttgaagctgaatttactggggagcgatggtcagcgcaagtgcaaggagattatggagcgtcccgtgaaggttttgcagattggagaaggtaatttcttgcggggatttgcagactggatgcttcatgagagtgccagacaaggcaaattccatggaagtgtagctgttacccaaccacgaccgggaggcaaagccaagctggagcagattcgtgatcaggatggattatatacgatgattacacgagggctgtctcaagggaagccggttgagcagacagagttgatctccattttctcacagtgtatcaatccgtatgaggaatgggatgcctttctgaacttggcggaactgccttcacttgagttcgttatttccaatacaaccgaatcaggattgaaatatacgtatgcggactatatcgagggtgaacccgtccaatcatttccggggaaattaacggttttcctgcatcagcgatatttgaaatttgatggtgatccatccagaggtttgattcatctgccatgcgagctgcttgaaggcaatggtgatgtgctgcgcagttgtgtcctccgtcatagtaaggattatgggtattcggatggcttccgttcatggatcgagaaccataatcacttcctgaacaatctggtagatcgaatcgtaacaggtgcgccgacccaggaggaagccgattccctgacgaatcgctgggggtatgaggaccagttgattaatacggcagagccatatcatttctgggccattcagggtgatgaatcattggacaaaaaacttcctctcaagcaggcaggtctcaatgtacattgggtgaaagatctgaagccttttcaggtacgcaaagttcgtattttgaatggggcgcatactttaatgtcatcactaggcattctccaaggcaagcagcatgtgagagaaacaatggaagatccacattttggctcatggatcagggaagctgtgcatcaggagatcgtccctgctctggatatgcccgatcatcagctggaccagtatgcagaagaagtgttcgaacggttccttaatccgtatattgatcacaaattgcaagatattgctttgaatacgatcggaaaattcaaggtgcgtgtgctgccaacactattgtcttacgagcaaaatcagggaagttggccagaacgtttaattcaagggtttgctggattattgtgtctctatcgtccggtaaatacgccagaaggttacaaggcacaacgactgaatggggaagatattctgctacgggatgaccctgatgtcctggctgctttggctgcacattgggacggttatgacacgcttaacagggatcaaaaccaattggataaccgggtagcggctgtgttgtcagataccctgatctggggcgaaaatctggatgcaagagaagggctgcgtgcagcacttgttcgtgaaatcggattgttggaaggtgaagggaaatgaacacaacaagtacaatcaatgactggattgccattcaaccacaggatgatgtcattatagcgcttcgggattatgccaaaggagaacgtattacattgccaaacggtgtttcttttaccttgctggatgacgtgcccaaagggcataagattgctgtgcataccctggcaccgggtgatgatgtgatgaagtatggtttctccatcgggattgcccaagagaagattgagcagggaagctggattcatagtcacaacctgaagacgggtctgcacggattacttgaatatgagtatcagccgggcgcacaggttcagacggacatgcctccggaacatctgctctcttttgatggatatttgcgccccaatggtgacgcaggtattcgtaatgagatctggattgtgaatacggttggatgtatcaataaagtgtgtgaagctttggcacgtatgggtcagtcccagtttggaagccgggtagatggtgtatttcactttccgcatccattcgggtgttcacaacttggcgatgatctgaagtatacacaacagttgctggcctccttggtggagcatccgaatgcaggaggcgtgctcgtcatcggtctgggctgtgagaacaatcaggtcgatgaattccgtgagtgtattgctccggaataccgcggcaaagtacggtttctcaaagcacaggaaacggatgacgagcttgaggaagggcttcgactgatggaagaacttgtggagatcgttgaacatgaacaacggcagccgctttcgctcagtaaactcaaaattggtttgaagtgtggcggttccgatggtttatctggcattacagctaatccgctggtcggtgcagttgctgatatgttggttgctgccgggggtacggctattctgacggaagttccggagatgtttggtgcggagacgatcttaatgaaccgggctgccaatgagcaggtatttcacgatttggtggacctcgtgaacggcttcaagcaatattttgtgaaccatggccagaacatctatgagaatccttcacctgggaataaggctggtggcatcacaacgctagaggaaaagtcacttggatgtacgcaaaagggaggacgttcttccgtagtcgacgttctgcgttatggcaaacgtgtaactcagaccggtctgaacattgtagaagcaccgggtaatgacctggtatctgtaacggcactgtctgcggcgggtgcacatattgtgctcttcacaacagggcgggggactccattcggaggcccggtacctacagtcaagattgcgacccaatccgatctggcgaatcgcaaaaaacactggattgacttcaacgcaggccagctgttggaggggcagacgatggatgaggtgaaagtacagctgttcagccagctgattgacattgcttcaggacggtcacacacactcagtgagcagcatggattccgggagattgccatattcaaggatggcgtaattctctaaatccattgtcgatgggggctgttgatcgtctgggttacattatatggtgaaccacagccaattccggttgaaatttgcactacaaccgggattggctttatttagattccacggatgccaagcgctttggagatgcttgataatgctgcaggtgaagcatgttgttgtagttgcacaatcaatagttcacgtgcctcttctatgctgccttcatatggcttaatgccgtgacgttccatccagtgaccagcagtctcgtatgcggagctgttccaggcgactttgccttctgcgagcccttctttttctttggtgccactgatcacaatggctgcacagccctgaaggtccagaagtccacggtcaaatgtttttttgtcctcttttgccccgaaaccggcttgtgatcgcaaggcacgtccatcgatgccttcttgttctgcaactaacgcatgaagtttgaacgcttcacgggagagtagacccgcttcatactgttccttgatagttctgggatcggcaagcagtcggtgtacccaagggaagtattcagatgagacaagaagcgctttctttttgacaaattttccatatgcagcaatgccctcttcagccaggcgtgaacgccataaccaaggatcgaattcatcatccttgtgccaatgttctttgggggttagcgatgacagagaaggataatcggtaaatagtggtgccagaggcagcagccctatagactggatacgctgtactgcttcttcgtacgttataacggcttcatatgtcatgatatcagtaggctcctttttgtgtgtagtcaagctacgacttggttgaagcaaggtatctccggctcacttcctcggcatgctgacgaatctcactgcgaagttggagaggttcaatcacttcagcttcacgtcctaatcggtaaaagaatcgtacggcccagtcccattcccctggtggacaaaggaatgataattcccagagatccggggcaatttcagtcatcttttcaccaatatgctcgtcctgttcagcttcaatcattccccgataactcagttgtaccttaaccagggttggcggctgttctggagggatcggcttactctgctgttgctctgcctgttcattaagcatctgtgcatcctgtggttcgatcgctttgacttcgataattcggtcaacccggaacagacgttgttcaacatgttcgagggaatatgcttcacagtaccagaagccagaggaagcatatacccgtgtgggacagatatgcaaccaacgctgacgtgatgcggagcgatacagcacactaagccacccgtgttcgggtatacatgccagcagtgcgtccagatgaggaagaatgtaattgcggtctggaatatgatgatgcagttgtttgagcatgggatcaattcgcgacataatatcatccggaatgatagccttaactttgttcatcagggtccagcgtttctcatgaaagggtgtgtcggcgtagcgacttagaccttcaagagcgaataggagcgtcgctgcttctaccgggtccagctgtaatgggggtaatacgtaaccctccataagactgaaaccgcctcccggaccggaaatggcaataatgggcacattcatctcggagagggattgaatatcccgaagaatcgtgcgacgggaaacctcaaatttctcacctaatgagtgtgccgtttcgtgaccatgctgtaatgccattacaatggcagcaagccgatttgttctgttcatgtcagccactccgtttcgatctgcgccgccggaaagtgatgtcgtagttatatttctattgtaacaacgaataagtgacatcatgagtgtcaccaatatttcaactgttcattattttataatggatcagcatcaggattcacaagcatgttccggcaggctttgttaaaatgtgtttctcgtccaattcgctttgcatactgatatttccttctatcaaaaagaccacagatcatgccaaaaacccgtatccggtgtagacggatacgggaagtagcagcttttggcttacagaagacgataaaggtctgaaatctataccaatatcctcgctgaagacaatatcaagtataaaaggaatgaatatgtgacactttgtatcgcgggaatttctatcacattatattattccgaatgatttcaattaagcgaaatcgcttatttcatttcgagcaattgcactccacgggcttcaatctcaacacttcccgaaagctcacgattggtgagcagatcatgtgccttagttgttcccagatcataggattgtgtggttgcgttatggttcatgacaaacaggtagggtctgccgtctttggttcgtgcgcttacttcaacaccttctggtgtctcaagcaaggattctacgttcttggctgctgcaagctgtcccagcaaaccatccaggaagcgctcatccgggtcggatgcaacgtaccaggcttcaccttgaccaaaggtattacgtgtcacaacaggcatgcctttataaaagtcgtctccatactccgcgatgacttcggctccttcactgtgcagcaggtcacacagcatgccgcagccatactctccttgaagatcaccgtaggtttctttgaggacaatgcggttcttttgctcaggcagcagggcatcaatctcttccacccagattccgagcagtttacgaaattctcccggatatccacctgtggtcacgagatcgttctcgttgacaatgccgctgaagaaggtcgtcaggaatgttccacctgcttcaacatacttctccagtttggcggcaaaccctggtttaaccatgtaaagaacaggggcaaggacaatgtcgtatttgctcatatccgtatccacactgatgatatctacttgtatgttgcggcggaagaaggctgcgtagtatttatggatctgatccacatagttcagggcaaccgtaggtccgcttgatttttcgatggcccaccagttatcccagtcgaacacaatggctactttggattcaacagatgcatccagcgtggtatctccaaggatctgcaattccttgcccagctcagcgacttcgcggaatacacgtgtattctcatgcccagcatgctcaataactgcaccgtgatacttctcacaggcaccaatggagcggcgaagctggaagaacatgatggtatcggccccgtgcgcaacagattgataactccacagacgcatgacacctggacgtttcagtgagttatacggttgccagttctgctgacttggtgtttgctccatcagcatgaacggttgaccatccttcagtccgcgcataaggtcatgagccattgccgtgaagctgacgggtgttgcgagaccaggataactgtcccaggagacgatatccaaatattttgcccatttgaaatagtctaattgcttgaagaatcccatcagattggtagtaacgacggagtccggaatatgttttttgatcgtattgtattccaatagataacaatccagcatgctgtcggagttgaagcgagagtagtccagcgagattccctggaacgttgaattgttgttaccccaatgttcgctcaggttgcttggtaatacaatttcgtcccaatcgtagaaggtatgcccccagaaattcgtattccatgctttgttgacctgttccagagtctgatagcgttctttcagatacacgcggaacgctttctcacagttgtcacagtagcactcaccgccgtattcgttggagatgtgccatacgagaaccgcggggtgatccttgtatcgttcggccagtttatccgcaatcttctcagcgtatttgcgataggtcgggctgttggggcaggaattatggcgcccaccgaatttgcgttttcgtccatcggcatctacacgaagcacgtctgggtatttttttgccatccaggccggatgggcagcagtgcttgttgcaaggcatatatagacaccgttttcatgtaaacgattaatcagttggtcgagttcttcaaaacggtaagtaacttcatcaggctgaatcagtgcccatgaaaatacgttgattgtggcaatatcaatgcctgccaattggaacatgcgcaggtcttcaaggtgggtttcgtgatcccactgttccgggttgtaatcgcccccgtagaacattttgggcagtttgttactaatcaatgtgttcacctcttgtataagaataatcctatactatatgatacatatgacttttaaaatataataaaagtaatgactcatataagaatatggaagtttatttcagcttacacccaaggaggcatcccatgtttatctccccccgacatcaacgatatttcatgacatcacgtgatcagccgttgcccctttatattgagagcctaggttataacggcaatcaggagaaggtgtccagacctgtggggtatccctgttaccattggcttcagacagtaaagggagccggagaattcaagtttgccgggtccacggtcgtactgggggaagcatcaggtattttgctgccgccaaatgaaccgcatgaatatgtgcgcgcccaaggagagtgggagacattctatattacatttggcggttcccagtgtccggcaatcttggagtcacttagtctgggtgaagcagcgttgcatcagtgggagcagagcagtccgttcaatgattacggccaggaagtgctggattcgatcagaagtgatcaggatttgtcgggactcgaggcgtcagcggatatatatcgatttctgattttgctcaaaaaacatggcatgaccggcaatcgctcatcgatctctcatgccgtggagagactcgctccgctcattgcattcatggaacagcattatgcgaatcctgagattggtctcgaacatatggctgacgtcacggggatctcatccagacatttgaacaccttgttcaagcagtcctttggcatgacagcctacagttatttcattttgctgcgcattcgcaaagccaaggaaatcatgacaggggataccgccctgacgattagggagactgcgattagggtagggtttcgagatgctagccattttgtagcaacttttcgcaggattgagggggtgactcctgaacagttccgtaatttgtactaacatgtacccaaatgatcaaaaagtgatgccaggaaggtattgatgcgttagggtcattaccgttatgatggtatcgattcctgagattcgaaaacgtttaaacggacccatggttccgttctacttggagaggatgattgaagatgacaacaactatacccttatgggatcatgctgcaccttatgcagcccagggtcatgaagacgagatgccacatttgattccatttattcagcccggttccgagagcgctgtcattgtatgtccagggggcggttatggatttttggctgatcatgaaggtgctccaatagcggaattgttgaaccgtgcaggtataagtgcatttgtcctgaattatcgggtggcgcctcaccagcatcctgcaccgataacagatggtcagcgtgccatacgttatgttcgtgctcatgctgagcagtatggcatcaaccctgctaagattgcagtacttggtttctccgcaggcggacatctcacagcaacactgggaacgctgtatgacgagggacaaccggatcatgaggacctcatcgaacgccagagttcacgcccggaccgagttattctctgttatccggtcattacgatggagtcctatggacatgccggttcccgtgagaatttgcttgggtcggacgcctctgccgagcagatcaaggctttcagtgcggagcagcaggtaagagcggatgctcctgaagcgttcatctggcataccagcgatgaccaggcagtacctgtagagaatagcttgcgttacgcacttgcattgggtgcgcatggcatcccctatgacttgcacgtttttgagaaagggtcacatggacttggattggctgaggacaaccacgcggttcgggtatggtcagatctgtgtctcacatggctcaagaatcaaggctggtaatcactgattggataacaacttaacggtctgattaatcaattattcttatattagcgccttggagcgaaggagaaaatgacgatgaaattgcagaaaaatgacaagcttctgtttatcggggattcgattacagattgtggtcgggaacatcctgtaggtgagggcagttcaggtctgggccatggttacgtagcgcaagtctatgccctcttgcggtccatctatccggaattgatgttgcgtgtccagaatgtgggtaatggtggaaatacgattcgtgatctgaaacagcgttgggatcgtgatgtgcttgaccttaaaccggactggctgacaatcatgatcggcattaatgatgtatggcgtcagttcgacaacccattttcaacagaatcacatgtgtttcttaaagaatacgaatccacattgcgtgaactggtggcttcggttcgtcccaacctgaaaggtctggtactaatgacaccttattatcttgaggctaatccggaagacccgatgcgggcaacgatggatatctacggagaagcggtacgcagggtagcgaatgagtatgatgcggtgtatgtggatacacaggctgcatttgctccattttgggatcatttctatacgtctgtgctgacttatgaccgggtacatccggatgcaacgggccatatggtattgtccaaagcattcttggatgccatcggattcgaatggtcaggcggcgtcaaatctgaataaggacgtgatggcatgagcgacgtaactgtagcagtacaaaccccggcattactaggggaaggtccaagttgggatgcggagaacaatcgattattgtgggtagatattgaaagctttaaggtgcatgtgtatgatccggctacagggcaggaccaggcttatgatgtcggtgaacatgtcggggctgttgttccctatcgtggtgacgaagttgtggttgctttacgcagtggattccatacgtatcacttgcttacgggtgagctacaggctattgaagaccctgaacaagataaggatacgaatcgttttaatgatggaaaatgtgatgcgaagggccgcttctgggcaggcacgatgagcatgaataatgagagcaaagccggatcattgtattgtttggagcaagggcaacccgttcgcacaatggtacaaggtgtgtctacatccaacggtctgggctggagtccggatcggcagaccatgtattacattgataccccgacacgttctattgaccggtttgattttgatctgacggcaggtacgatacaaaatcggacaagtatcattcacataccggaggaattcggttttccggatgggatgacggttgatggtgagggcatgctgtgggttgcgcactggggcggtggaagagtcactcgttggaacccgcatacatcggaactgttgcaacagatcgaggtgccggcagatcaggtaacatcctgctgttttggtggaccggatctcgaagagttatacattacaacagcacgtatagggattaaggaagaacgtctaaaagagacaccggatgcgggctcactttttgtcatcagaccgggcgttaaagggcaggagactcacgcttatggtagccagcaataaacaggtgccaattatgtagtgaaccttagtgaacctctgcctggtttgccaggaaagaaacgattccattttttactcttatataaaatgtcgaaaggtgctgttctaacagcatctttttttgttgtataaaccagtttaaacactgaaaatattttacaaaaatcggaatttcgacagaggggtttgtagattgccagcgaatgttatttattgaaagtattatccagataaccgcgaatcaagaacaattatgtaagcgcttaacaatatgactggaagggggtgaggcttcttgtatcaagggatgcattgattcgtctggcacgccatcatcagcacgatgagacagcggggatagaccgaaatgcagtaacgaagtagaagaggaggataagttaatatgagtacgtttatggggaaattgcgaatgatgagcctgacggttgctgtagtaaccgcctcgctgggaggacttgctggaacaacagcggcggcaccaagtgaagcctatgagtggaaaaatgtggtgacgggtgcaggaggcgggtttgtaccgggcattattttcaacgagtcggaaaaggatctgatctatgcccgtacagatatcgggggagcctatcgctggaatgcggctgacgagaggtggatacccttaacggattttgtcggctgggatgactggaacaagaatggtgtggacgcactggctacggacccggttgatcccgatcgggtgtatatggcagttgggacgtatacgaattcgtgggaccaaaataatggctccatcttgcgctctacggaccggggagatacatggcaaaccacaacacttccgttcaaagtgggcggcaacatgccgggacgttcaatgggagaacgcctgaccgtggacccaaatgataacagtattctgtatttcggtgcacgaagtggtcatgggttatggaaaagtaccgattacggtgtgacctggaacgaagtcacaagcttcccgaatccgggaaattatgtgcaagatccttcgaatgaatataccagtgacatcgtaggtctggcatggattacatttgacaaaacaacaggttcggcagggcaagcaaccgagacaatctatgtgggtgttgcggataaagatcaaagcgtatatcgcagcacaaatggcggcctgacttggtcagctgttgctggtcaacctacaggttatatcccgcatcatggtgtgtttgattcagacggaagcctctatattacgtacagcgatggtgttggaccctatgatggggcaaaaggtgacgtgtggaaactgaatacgtctacaggtgtctggaccaatatcagccctattccaagcagcagtacggataattattttggatatggcggattggctgttgatgcacagaatcccggtacattgatggttgcgacattaaattcctggtggccggatgccaccttgttccgcagtacagatggcggagcgacgtggacacgcatatgggaatttgaaggatatccgaatcggaagttacgttatacacaggatatttcggcagcgccatggctcacatttggcaccaatcctgccccacccgaaacaaccccaaaactgggctggatgatcggtgatctggagattgatccgtttgattccgatcgcatgatgtatggaacgggtgctacgatctatggaacgaagaacctgacagactgggatgatgatgaaaaaatcaatatttcagtgatggcgaagggggttgaggagattgccgtgctggatctggtcagcccgccaagtggtgcacatttgataagcggattgggagatgtctccggattccgtcataacaatctggatcaggctccagctaccatatttacgagcccgaactatccttccacagaaagtctggattttgcagagttaagtccaaatacgatggttcgcgtaggtaaagcagattatgctgctgatccaaatgcaaaatccatgggtttgtccagtgacggaggtactacgtggtataaggctaatgcagaacctgccggcacaaccggaggggggaccgtagccatctctgcgaatggtaaccgactcgtatggagcacatcagataaaggcgtacattattcgactggcggcaattcatggacggcaagcacgggcatacctgcacaggcaaaagtgatttcggatcgtgtcaatccaaacaaattttatggatttgcagcgggtaaaatctatgtgagtgtgaatggtggtgctactttcacggcaacatctgcgaccggacttccgatggaaggaaatgccgatctggatgccgttccaggtgttgaaggtgaactctggtttgcaggtggtagtgaggaagaaggtccttacggattatggcattccacggattcaggcgcgacattcacgaagcttgccaatgtagaggaagcagacagtatcggatttggtaaagcggcccctgggcagagtgttgttgcgttatacacggttgcaaacatcgatggaacacgtggattcttccgctccgatgacggtggtgccaattgggttcgtatcaatgatgatcagcatcagtatgctcgtgtaactacaattacgggtgatccgcgtttgtatggaagagtatatctcggaacaaatggccgcggaattttgtatgctgaccgtgttggaggtaacaatggcggaggtactccagtgaccaactctgcgattacaccggttacagccgaatttaatcgcaaagcaggcaatcagattaatattccagtcacgttaacacttaacggcaatacacttgcatccattcgcaacgggaatgcaacgctggtttcaggtacagattacacgttgacaggcaatgaggtcgtattaagtaaaaactacttggcttcacttcccaatggcgcagcgacgctaacctttcaattcagcgcaggtgctcctgcgaccttgaatctgctcattaaagacacgacagctgcacctgttggaaccatacgcattgagatgtttaacagtaacatttcagcgacgggcagctcgattagtcccaaattcaaactgacaaacacaggtactacagccttgaatctgtctgatgtgaagatcagatattattacacgataaacggcgaacagcctcagaacttcttcgctgactgggcgactgctggcagtgcgaatgtaacaggcacgttcagtgcactcaatccggttcggacaggtgctgaccacgtgcttgagattggattcatagcttccgctggaactctgaatgcaggacaaagcacagaaatccatacgcgcatctccaagaacaattggaccaactatacgcaaacggatgattattcttttgcaggtagtcagacttcctatacggactggtccaaagtcactggttatatcgcgggaagtctccaatggggaattgaaccataagtgagtgatttaacgaaatgaaggattgaaataggggtcctgattcgccagatgatcaaatggcgagtcggggcttcttattttgtcgaaatatagtgtaaactatagatagttaccattgcttaaaggatcgttttaggatataaaaagaagtacaattaatttagaattaatgtaaccgctaacactggaaagtgtttataaccgatatataatagttggtatagcctgtacagatatagaggaaagattagacaagggggtcgcgatcatgaaccggttgtgcaaggtgctgattgttgacgatgagtttctggtaagacagggcataaagcaccatatgaactgggaagcggaaggatttatcattgtgggtgaagcttccaacggtgaagaaggattacagcaggtgaacctgttaaaaccggatattgtgatcaccgacattgtcatgcctgtcatggatggcgaaacgtttgtccgtacactaaaagccagtaatccgcagattgaagttattgtacttagcagcttcagtgaattcgagtatgtacgttcaacgcttcagcacggggcagccgattatatactgaaacccaagctggatacaaatgaattattgcaagtccttcaacgcacagcgggtaaaattccggagctacagttcgagccgtcgcacgatggctggagacttggacaactgatggaaaagatgctgtccggatttacactggatgaagatagcgaaatgccgatcattcgagatacctttccgtatgaatcctttcgcttgcttgtgtataaacccgtgggtgctggagggaatccactgaagatggatcaggaacagattgaatccaagctccgtagtgatctgcctgaagtagaatgtgcaatggttcccgcagagggtacattacctgtgatgcttcttaatgtcgatcctgtgagagatgaatggatgcttgaacggatcagacagttggccagtgaaaatgcagcaggagaagacagtcctggttgggtgcttagtgaaagctttacttcatttgaacagatgggtgttgtttaccgggaacgcctgattaagctgattgaatatcgtttctattataaggatcgaccaatcctggtgtatggtgaactacctccaatgcatcccgcaggttaccagtttaatgtgaatatgtttttgcagcatgtgaagcgtaaccgggtcgaagcggcaagggagtatttacaggatcatgcaaaaacacttggacgggattatattgccgatgtgtttgagatcaaatcatttctcggtaacttgatcttcaacgtgaccattaccctcgcggatatggatgttcagtctgccgggctggaagagagcaaatatacgtattttaaaaatgtggacggcgcttcgagtctggacgaagtcatgaccgtgcttgatcaattcatgacggaagttcaggagtgcaccgttggtgcgggtggaaaacgaagtgatcccaacatgaagatgttgctggattacatgcatgagcactttgatcagccgctcgggcttgctgaagtagccaagcactttcattttaatccatcgtatttatccagttatttctcatctcacaaaaaagaaggatttaatgaatacttaaataaaattcggattgaaaaagccgaggaactgctccgatccgatgatgtaacgatctctgagattagcagtatggtaggttattccgatcatagttacttttgcaaagtgttcaaaaaattcaccggattatcaccaagccgataccggcgcaaattctgggcataaagtcagaaggataagatcatgaagaaatggatgaaccaattatctcgtctcggattgtttcctaagttgtttctggttatggtggtcagtattgtcctcgtttctgtactcatcttatggacgaccattcacatgtcaaccaatctgtttactgagacgttcagtatcacaaactccaaggtgcttaatcagatcaaaacaaattttgaatcctttaatgaggccattgctgccgtatcgaataatgtgacgcagagtggatcgatccgaggattcctgtccgaaggagatgccgattccctcacgatggccaaatccttctataatatgagggaaacgatggatcgaattcaatccatcacagaatcctacgaagttgggataacaattatcgggattaatggacggagctattccacgaatcgtgctcaccttcagttgtccgtggatgaattgaagcaggagccaattacgatggaagccgctgagacgccgagtcgtcttatctttgatgtttaccaaaacgaggcaacgcttgggagtcagcagatgatctctgcgacgaaagctttgacggaccgaacacgcagctggatatacggtacgctttatgtcacgatgagagaagacatattccggcaattttatagcagctttacaagtcgtggcaatgatgtggtcattatgaatgaaaaaggtgagattgtatcatcgaatcgtgaagactggatcggaacaactcagctggatttgctatcgtatgcccgggatatgaacaacaactctccgagaagtattaatgctcgtgtgatggatcaggatagcgttgtgttatccgagtatttaccgttctatcggttttatattgtcaatgtagtggataaggatctggcgatgggtcaacttatcgacatgaagacggttgccctgatctgtgcagctatcgttgtgggggcactcatccttgtgtttctcatcaccagccagattaccaagtcactgcgcagacttgtgaagcagatgtccaacattacaaaaagtgatctggacaactatattccggtgagcggaagctacgagagcaggcagcttggtcatgcttacaattacatgcttgatgaactgcatgattatgtggatcagttagtacagacacagcatgaacaacggaatgcagagcttgcggcattacagagtcagattaatcctcacttcttgtacaatacacttgcatctgtcaaagttctggtgcaacaaggcaacaaagacagggctgcggagacgattaatgcattaattggattgctgcaaaatacgatcagtgatgtgagtcagacggttacagtggaacaagaagtcgagaatttgaaaaattatgtcttcattaatcacgtcagatatggtggccggattaaagccgctttctacgtggctccggattgtacacactatcatgtacccaaactggtgatccagccgtttatcgagaatgcatttttccatggattcatcaagaaagaaacgggtacgattcatgtcatggtttccagagcgggagaatcactcatctgtgagattatggacaatggggatggaattgaagggcttgtcatgggagaaacgttgcccaatccaaagaacaatcgtcaactattcagtggtattggtattcgcaatgtccatgaccgtattgagttattatatggttcaccttatggggtcaccattatgagtaaggttggggaaggaacgagagtgaccgttacactgcctttaatcacgagttgaatcgaaacccgattcgattgaatacacttaaaatcgagatccctcgcttctgttttctacagaggcgggggattttcacgtgtcagaggtaaagcgggtaaaatcatttttgtactattccaagatcaagaaattacaaaatcaaaagaaattacaaaaaaccaaatttaatgcaaacggtttctgtaaaggttttcattgtggcaataagatgacaaatccgtacaaaattattactaacgaaacgcgatttgggaatgataagatgtatacatcgaaagcaaccgctttcagaaaacgcaaacaaattacacacaaagaggtcgaaggggagttgaatgttttgaaaaaaatgtgggtattgatgctcgttacagtactgctgttgtccgcatgttcatccggtggcggaggtaaatccgctagtggtggtgacgaaaaaacaaacgaaatcacggtctgggcttgggacaaagcttttaacgtagctgcaatggaaacagcaaaagaagcatatcaaaaagcaaatcctgatgtgaaaatcaacatcattgaatacgctcaagctgatatcattcagaaactgaacacaggtcttaactccggaactgccagcggtcttccaaacgtagttctgattgaagactatcgttcacaaagcttcctgaatgcatatcctgatgcgttcaaagatctgtcttccagtatcacggcttccgattttgcagattacaaactcggaccaacagcgtttgatggcaaacaatacggagtaccatttgactccggcgttgctggtttgtactacagaacagatctgctggagcaagctggctacaaagcagctgacctgcaagacatcacttgggatgactacatccaaattggtaaagacgtaaaagctaaaacaggtaaagagcttctttctcttgacccgaatgaccttggtttgattcgtatgatgatccaaactgcaggtaaatggtattccgcagaagatggtaaaacacctgacattgctaataatgctgctctgaaagaagcgtttattacttacaaagcaatgatggatgccaacattgttaaattgcactctgactggagtcaattcgttgccaacgccaataacggtagcgtagcaacaattcctacaggtaactggttctcaccatctgtacgtcaagaagcttcccaatccggtaaatgggctgtagctccaataccgaaaatggctggtcaatcaaactctgttcacgcatccaacttgggtggtagctcttggtatgttatgaacaacgttcctggtgcagatcaagcagctgattttgtagcaaaaacatttggttctgacaaacaattgtatcaagatctgttgaacaacatcggcgcaattggtacgtacaaaccagcagttgatggtgacgcgtatgccaaagcagacgagtacttcggcggacaaaaaatcttcacagactttgcaaattggacgaaagaaattccaagcgtaaactatggtatcaacacatatgccattgaagatattctggttgtagaaatgcaagcattcctgaacggtaaatcaatcgatgacgttctggctgatgcacaaaaacaagctgaagcacaattaaactaagatacccaaggtaacttatagaaccctaggaaacatcggagccgtctcccatgtccggcgcaagtcgaaccggatatggcgagaggctccgtgggttctacccatgttccatggagagagaggagccatactgtgaaagccatgaatacaggagacagtctccaaaagaaaaataatttgactggatgggcttttgttttgctggctgttgtcgggattgttgcattttacttctacccgatgatccaagcgctgctcttatcgttcaagtctggtgtaggagccaatcttgaattttcgggcctttctaactacaaaagattgttagttgatacaacgttccgtacagcattatcgaatacatttatctacttgattattcaagtgcctgtaatgattatccttggtttgtttatttccgtattgctgaatgacagcacactgcgcttccggagtttcttccgtacagcgattttcttgccttgtgtaacttcattggtagcgtactctgttgtattcaaatatttgtttgcaccagatggaatggtgaatcaattcttgatgggcttgcacattattggcgatccaattcaatggatcacagacccgttctgggctaaaattacgatcataatcgccgttacttggcgttggaccggatataacatgattttctatctgtcatccctgcaaaacatcgatcaatcgatctatgaagctgcaagaattgacggagcgaatgcttttacacaattcttcaaaatcactgtacctttgcttaaaccgattatccttttcacgtccatcacatcaacgattggtacattgcaaatcttcgatgagatcatgaatattaccaaaggtggtccaggtaatgcgaccatgtcgatttcacaatacatctacaacctttcgttcaaatattcaccggacttcggttatgcagcaacagtgtcgtattccatcgtaatcttgattattgtattgtccatcatccagtttaaagtggcaggtgataataaaaatggctaaagctaaagcaaaacggattttcacgtatgtgttcctatccatcgtcgcctttgtatccattttccctttcttctggatgctggtcagttcaacgaatgcatctgtcgatgtaacgaaaggcagattgttaccgggttcagctttcattgataacttcaacaaactgattgattcgacaaatctggtacaggctctcggaaactcggcgattatctctgtagtctccactctcttggcactgtttattggttccatggcaggttatggcttcgaggtatatcgcacgaagtcccgtgatgtcgtgtttaatatcctgttgttgtccatgatgatcccgtttgcagcgatcatggtaccactgtatcgtatgtttgcaacaatctcgggagttgcaccggttatcggaatcaacacgatggcagcagtgatcctgccaaccatcgcaacagcgttcctgatctttttcttccgtcagaacaccaaaatgttcccgaaagacttgctggaagctggacgtattgatggtttgagtgaactcggcatcttcttgaagatctatatgccaaccatgaaaacaacatatgcagcggcagcaatcattacattcatgagtagctggaacaactatctgtggccactcattgtattgcaaacacctgaccaacaaacgattccactgttgatctcaaatctgggtgctggttattctccggattacggagtaatcatgacagcaatcgtgattgcaacactgcctacagcaatcgttttcttcatcatgcagaaacattttgttgcaggtatggtaggttccgtgaagtaatgaaaacagcataatccgtgcaaatgacggatgcaggaaagaagagagggcgctgttatggcgtacctctgtcttttttgtttatgtaaagcaaaaggaaatccagcgtaaaccttgaataagtcaaaaaactataacgttttaaagggagagagagccgatgaaagctacaaaggcagatatcaactggttgggggacgtaagtgtatttgaggtaaaccgtcttcatgcctattccgatcaccgttactaccaaacaatggacgaggctgtaggttcaggcgcgatgtccatgcgttatgatctgaatggtacgtggaaattcaactatgcaattcgtcaagacagccgttctgagtttttctatacatccgatttttccagtgaaggctgggatgatattgaagttccggggcatatccaactacaaggatacggacagattcaatatgtaaatacacaatatccttgggatggactgaacgaaattcgtccgccggcattgccgcaggataaaaatccggttggaagttacattcgcacattccacctgccaacaggttgggagtcgaatccggtatatatttctttccaaggtgtagagtctgcattctatgtatggcttaatggacaattcgtaggatacggggaagatagctttacgccatctgattttgacctgacgccataccttcaggatggagagaacaaactcgcagttgaggtgtatcaacgcagcacaggcagctggctggaagaccaggatttctggcgtttctccggcattttcagagatgtatatctgtataccgtcccagctgcacacgtacgtgatgttcatgttcgcacagatctggacaagtcctataccaacggtacgttgcaactagatttgaaactggaaggaaaagcggttgctggagcgcgagtagaggctgaacttcgtgatcgtgatggcaataccgttaaaacgtttgagtccaaagttaacgatggacaagtaagtcttcgtgaagacatcggcacagtgaacctgtggagcgcagagattccatacttgtaccgtctctatattcgtgtatatgatgctgcgggtgcactggttgaggttgttcctcaagccgttggtttccgtacatttgaaatgattgataaagtgatgcacatcaacggtaaacgtatcgtattcaaaggtgtgaatcgtcatgagttcaacccgcgtcgtggacgtgcggttacgaaggaagacatgctgtgggatgttcgtaccatcaaacagaacaacatgaatgccgtacgtacgtcacactatccaaaccaaagtctttggtatgagttgtgtgatgaatatggattgtatgttattgatgagatgaacctggagacacacggatcttggcagaaacttggtgccgttgagccttcatgggttattccaggtgacaaaccggaatggcatgatatcgttatggaccgcgctgtatccatggtggagcgtgacaaaaaccatccgtccattctgatctggtcttgtggtaatgaatcacatggtggtgaagtcatctacaaagtatcccaatacttcaaatcggctgatccaacacgtctggtacattacgaaggtgtattccatgatcgccgtttcgatgaaacaagtgatatggagactcgcatgtatgccaaaccggcagacattgaggaattcctgaatgcaaacccgacgaaaccttatatcagctgtgagtacatgcatgccatgggtaactctattggtggtatgcacaaatatacggagttggaagacaaatatccgatgtatcaaggtggattcatctgggattacatcgaccaatccatttataaaaaagatcgttacggcaaagagttcctcgcttatggtggagattttggtgatcgtccatcagactattcgttctgtggcaacggtatcgtccatgctgaccgtaaagtaactgcgaaaatgcaggaggttaaattcctgtaccagaacatcaagttgttcccggatcgtgaaggtgtcaaaatcgtgaacggtaatctgttcgcagatacatctgcgctggaactggtatacagcctggagcgcgagggacatgaagtgctgcgtggaacattggaagtcaacgtggatgcccaaagcgagacggtagtgaaacttccgctgggtgcagaagctctggctggcggcgagtacgctgtgaacactgcatttgtgttaaaagaagctacaatgtgggctgacaaaggcgaagaagtggcatttggacagtttattttcacacaggatcaggtcaatgatgcagttgaagtcgacttgaatcttgtaagtgatgtacaagttatcgaaggtgacgtcaacatcggtgttcatgctggcaagacacatgcgctattctccaaacagtttgggacactggtttccctgaaattgtccggtcgtgagacgattgctgtaccacctgcaccgctcttctggcgtgcaatgacggataatgacaaaggtatggcgatgggcttcgaactgggtgcctggtatgcagcgagcctgatgccacgttctgtagagtggaaagcggaacagaaaccggatcaataccggatcgagttcacgtacaagctcaacatttcggaggatgtacaagtgaaagtggtctataccgttcatgcagatggaagtgtacgtgtgcataatacgtacaaaggtacagccggattgccaaacctgccaattcatgcattgtccttcagaacatcacctgacttcgaaaacgtggaatggcttgcgatgggacccgaagaaaattatgcagaccgcgcatttggcgcacgtctgggtatccatggcagcaaggtagctgatactatggctccatatctggtaccacaggaatcaggcaaccgtacgggcgtacgttgggccaaattgacagacaacgcgggacgtggcttcaaaattgaagcatccggaactccggttgagctgaatgtttcaccatatacggcatttgagctggagaatgcacaacatgcgtacgaattgcctcctgtacactatacggtcgtgactgtagcgggtaaacaaatgggtgttggtggtgatgatagctggggtgctccagttcatccggaatacctgatcccttcggacggcgaactgacatttgaatttgtcattcgtgcactgtaagtaaaaggatcatacagaataaagaatgtattctataaagaacagaggtcttcgctatcggaggcctctgttttgttatgtcaacgaacagcttggaaggcttggtatgaaaccgttctctctccaacctcgtaatgtacgagacaggaaacataagaggggggttcaagatgagtaaaaaagcaaagacaggtatatgggtgacggtgttggtcttcttgggcatcatagttggatgtttcatatggtatttcaataccgcttcaggtgaacgtgcactcaaaacaatgaggtccaataactctggtggcctggagagggttgttaaagtgtacagcaataatggtgaattgattcagacctatgatggcaagattgacgtggaagatacggaatacggcaataaagtattatttgatctcaatgggaaacgtgttgtgatctataatgcaacgattgttgttgaagagaagtaagcgtaatttgccagtcttgacgaagcgctggtttggaatttggaatgacaccttatctcttatatggtaaaattaaggaaatgatataagggtcgggtgagatttttatggtggatatgtacctcataatcctagttgctatcttgggaatgatcctgttctatagcttgatcgcttatttcttgattcgtttcatttcgaaaaaagcattcaagctgacgttaaccaaatatgaaatgacggagattatgacttggctcgccgtgttgtttattaccttcatgatgattaagacgggttcgataaatcttctcttgccggttgttttacttatcattccattgatcaatttgcgactttccaatcggaaacatagagagctgaactcgtaagctcttgctacgttggggtaaggtacaagaaggatgaacataggaaaggttgacggagattacatcactagtcaaccttttctagttgtatgattatgaatggtgaaaatgaacgggaggatttcaataatgatcttcggaaaatcaacggatacttcaggtgtaacgcaggttgccaatctttcggatgagttgcagtctgtttttgatcaagcagaaagcaaatataaaatagttgatattgaactcttctttgttttcaggtgtcttcctgaagaatatgagaggaagtcgacggtcagacatgtgaagaaggagaatgtcatctattttgatctggtggtcagcgaggatcgttataagacattaagcaaaagcaaacaacggtatgtcttaagccatgagttttatgcttttttaagtgaaaagatccagaaatacaagattgaacatttaaaagtgaatgagtttatcgcagatatgggcatgtggctgagggagattgaatggttgcagaccgaagagcaagccgacataagtgaatttgaagaaaagtataactaacaaaataaagtgatataaacaacaaaaataggccctctttcgagggcctacttttcatgggagaggagttaattcggctcatgagttcatatatcaaatcgtgaaaccattggtagattaagcttttcatcagaatatggagtagagtagaaatgctatttttgggtactttttgcgaagtagctcgacaagttggattatcgtatagctcaggttaaacctctctttatgctgggaagccttaaaccttccaaaagataccatcaaagaattaagtttggtatgattggttttgggaagacaaccagcatgaagctgcctgagggggatttattccgtgtatgatatttatgtaatcacaaataaagtgaacggcaaaagatatgtgggatacacgtcaaagggatatgagtcgagattcaatgatcatatcaaacaatctcgtggatcaagcgaaaggtatctctgccgagctataaggaaatatgggaaagaccaattttataccgagttaattgaacaagtcgaaacactcgcggaagctgctgaaagagaaaaacacttcattggaaaaatgaaaacctttgctcataacaaggatgcgcatggatataacgcgactttggggggcgaaggaatgaatggggcggttttctcaaaggagacgaggaagaaaatcagcgtcactcacaagaagcgcggaagctggtccggggaatcgaatcctaagtatggaaagggacaccttgttagcggaataaaccatcctctatttggaactaagatgtcaatagacacaaaagagaagatcggtaattcaaatagaggacgcttaaaaggtaacgctaatccatctataaaggctgtaatatgttattccttggagtgttcaactggtttaattgagaaattcaactctttttttgatttaagagattcatttgaaaagagaggtataaaattgaaccgtagcagtgttcttgcagtcatgcgaggcggaaaaggtcgaaagacttttaaaggtcatatgttttttcgccaagatgtcacagaacaccgagtcctaactgagattgaacataaattcaaacacggaatcattgaaccagttgtaatgaaagatcacagacaaggcagtatccatccaaatgcaaaatcagtctcttcttatgctgtggacgtatcaaacggagaaattcataagtttgactcatggtttgatttgaaaagttggtttgatgttcgagtcggttccaagaccagttattccaacttatataatgccttaaaaggcaagtatcgtcataccagaggatacaaacttttcagagatgatgtgactgacaaagatacgatggatgatcttttattgaaatacaacgagggcagaaccttcaacgactagtcgaaagacgtagggccaagcggctcgaaacgggaggcatccaagcctcctttttttattgcttggatgaagataaagtctgaaacatacagctgctgaatggggtatggtattagcggctacaccatgtgaacagagatggacgcgatcaaggaattgactattcgtacgaaggtccgatgcaagacaacccatgaaggttataaactcctgaatctcaatgctgcacaattcgaaagcgccatagctggtggaggtaaaaccgcataatggcaacacagaagatattccaagcgctcgtcaaaatcgaggatctgataaagcgtaatgctgcaggtgtttcactctttggtactcagttcgaggatctggagtatgaagcaatcaaggcaatgggtgaggctagaagccaattcgatcacacccgagagacaatggaaaatgttaagaatgttaagttcgacactttgggtatggcattccagtccatcggacggtcagttgagatggatttcattcagcctttgggtaaaaagttgttgccggttctttccaaagtggcaaagtggttccagtctactgatggcaaggcgtggatgaaaaacatgcaggacaatattcaaaagatcataaaaaaggctgttgatctgtacactacgattaagaataactggtcaggtgtaaaaagtattgctttgtctgtcgtagcaggaattgtagctatgcaaacagcatttggagctttaaagataattggtagtattaatgcgcttatgaatgcttacaaagcaggaacactcttggcttcgtcagcacaatgggctctgaatggcgctatgctcgctaatccaattggcatagtaatagtttcgataggtgcgttggtggcggctatcgtcctagcaataacgcactgggactccatcaaagcagctgtaatgcggttttgggagtatgttaaatcagcgcttggaaatatcggaggctggttctcggaacgctggaacgaggcgtataacgcagcgacgacagcgttcggtggtttgactggttggttcggcgggatattcgaaaacattaaaaggatattcagcagcgcagttaactggatcattgataagctgaactgggtgatcgacaaggccaacgggatcagctttgacatacctgactttctcggaggaggcaccattggcgttgatatccctaagatcccaacagtgggcggatacgccaagggtggttatgtcgatagacctgagcttgcttgggttggtgagggttcgtctcctgagtggatcatcccggacaacaactcccctcgttctcgggggcttctcgaatcagcgaaccgcagtatgggcgttgctgcagctcctacgggcgcgatgaatatcaattacaacccgcagatcattatccaaggcaatgcaagcaagagcgatatcatagcagctcatgacgctggtcggagttcttttgcacaggaaatggcgcagtggcaaagacaaagggaaagggtgagcctcgggtgataatatgaacggtaatttgtttgagacttgataccattcattattaataggccccttaataattcgaaatgcattattaaggggcctattagggtgcgtctttttttagcgaacatacaatctgattgacaggtcttaagaactaaaggaaaatgaaataattaagtaaatctttccagcaatatctaatttaattggaggtaagttagtgagtattcctgcttttttcgataattatcatttgccagatggtgaacacgtatgtacaatgaaagaaatagagcgtgtgttcctattttcagaaaaaagatctaatgtgtggggaaagttcttagacttgttatcaaagctagaagaattaggactgaagtatgaatatatattgattgatgggagttttgttactggaagagaagaacccagtgatgttgacttcggaatatttctccctccttacataattgctgaagctctaactgttctaagtgatagtgaaaaagaattattgaagtattttacagatctaaataatcagtatgaaataagtcagaaatttggagcccatttactaatcggtcacaatgacattatgatggaagacatatctttttgttttagagaaggattagattctgaactacgcccccctgaccctaagagagatccggaatgggtttcaactcccgctgctaaggggatacttaaagtgattagacaggatggaggtgagtcaattgaacgattcgatgaatgataaaattcaaggggtttccaatagattaaaacgtgctaaacaaaatcttgatgatcttagagaacaatataaaatgaaccctgatctcttatccatatacgagccttctgctgtttatattgttaatcaaattgagtcaaaattaaaaagaatgttatctgaacagtttggagtttcattgcaacctgagcaggtagagcaagagaacgttgatatatgggtaagaattgaaggtaaagagtttaaaaatggttcaggccctattgggcaaattggtacttacttgacacttttaaataaagtgaataaacaagctatggctttagtaaaagaaaaaatgggggaaaaaatcaaactttcagatttaccttctctaaatttagtggctacagcgcctggtagcttaaagcttggtctgaataagccccaagtcgaaactcccgagccagatcctcaagcagatttgtttaatggatacaaaggtaattgggagctgcttaaagagtctcttgaagaatcatctttggtaagtcaaggaatgcaattgattgttcgaagcatagcatccattagtgatgaatccgtctcttccgaacttaagcaagaatatacggagaaaagcataataaagatgttacattatgtaaaagatttgacaccttcaagtagatccgatatagattacgttagttttgaagggaataatattcgagttaataataattatattaaaaccactaaagaaactcggaagctcatatcagaatattcaaaaaaattagctccaaatacggagtatgtagagggtactgctacaatcatggctgcagatataagtaatcaagcattgatagcgcgtcccttcaaatttaatggtgcggaacacaaagaaataaaatgcattcttcttgacactgtgcctgcagaagatatcaagaatcttttaaatcagaaagtagaactctcaggatatattgtgtttgataaaaacagaagtaaaatgttacgtcttgaaatagatcatataaccataagcgataataatgctttttagtaataagaaccatacctcagcgtgtggttcttatttagtgtcgatacctaataaaaatcattgggaggagagtagttaatgtggcatagtgtatgggattttattgtgaacgattttttaagttttattggtgctctttctatttttggagggttggcgcttggcttaacatatttcttgaaaaagtatgtggacaatcaactccaaaagaacctgcaaggacacaagcgagagatggacaaacaaattgaagcatttaaacacatacaacagagggcctttaaggaattcgatctatacactacaaagagacatgaagtctatccagaattacacaaattaatggaacaagcatatggcgaaatacttggattaagaggtctaaaacattcacctgatttcaagaaatacagtgtagatgaactgagagattaccttaaaaaaaataaagtaggggaagttgatacgaatgaattgcttgatcttttttccagagataggagagcagctgatagaaaaatatctgagacaatgcgtatagttgaatactatcaaacattaaacttttggagcgaggcgaataactacttagtaataaacgaattatatttgacggaagaagctagagattcggcagttgatttgctgagtaatttgcggaaattttggattaatgttgacccagaactcccttatgacaaagaaaattctgcagagatagagaatttaaaaaagatatttctgcctactagtagaataaggttaaaattagcattaaaaaaagatttaagtgagtcattctcagatcacccataacttaccgcctcaaccctttgtagcaaaacgctataattgggttgaggtgtttttatgttcatcagtcctatgttacttgaaacagcatcgggtccattctcacattcggatttcatttttgaacctaaggttgatggtcaccggttgatatattcgcaacagtccggcaatgtccggttatatacacgtcacaacaacgattgcacacgtcagtacccggaattactactaccctttgactctgacatcatcttggacggagaagtcgcttgcaccgatccagttacaggcttgaacgactttgaggcagtcatgagccggttcagcactcggcagcactcgaaggttcagcagcttaccatgacattgccagccacgttcgccatattcgatattctgcagtacaacggtcacaacctccgtaagctacctcttatagagcgcaagggattctacaagggttacaacttccatctagtctttggagtggtgccgcatgttgaaggcgcaggagaggccctatacgcccagatagaggcaatgggcatggagggtgtagttggtaagcgcaaagacatccagtatgttagcaggcgatccagagagtggcagaaggtcatcaactggtcatataccgatgtattcatcacaggatacaaaaagtcagaattcgggtgcttgctgctgttccagatccaagtggcagtatgcgaccggtagggatcattgagcatggtccaagtccaaaacataagcaggctttccgtggagtgtgccagcagcttgtaacaggggaagatgagaaccatgtttacctggagccccgaattcaggccagggtcaaaatgcgtaattggaccaaatcaggcttgctacgtatccccgtgtttgatcaatttattgtgtgattatatattgtaaagacaatacaggaggtgttttgtatgtgtggtagatttacaatcactgatcccttggacgcaataatggacagatactatgcatctatagctgatggctttgagtacaaaccaaattacaatgctgcccctatgcaatacattcccacaattataggcagcaaggatggaaataggctgggttcgctccgatggggcctggtacccgtttgggccaaggatgacaagattggaaataagatgattaatgcccgagccgagacactggcagagaagccagcttttaaacgtctgatcagctccaagcgctgtattattccaacaaacgggttttacgagtggaagaaagaaggatctgcaaagcagccaatgcgcatcttgatgaaggatgaccgcttattctcgcttgccggcctgtacgatacttggacagatccggacggaaacaaactgagtacgtgtacaatcatcactactgaaccaaatagcctaatggaggacatccacaatcgcatgcctgtcatactacgccccgaagatgaggctgagtggctcggaagagacaatgatgatgttcagtccctacttgacttgctcaagccatatcaagcttcaaagatgagagcatacgaggtgcccaaggaagttggtaatgtgcggaataacaatgaggaattattaaaggaagtaaattagatgctcatttgtgagtgacaccatagcggtgggcactctttttttttgttttagataacagaaatttatggaaatacctacataggtctgatagactattctggattgatttcatcgttgaaggagtttgttatgattcataatatcagtgagatttttggtatggtattctttgcaggattgatcttagcgttatttgtactaggcttaatgggtattgctggaatgtttcttaatatctatagaagattgaaagggttaaggactaaaaaaatggaaccttgcagatcttgtgggcattcaatctcaagttctgccattgtatgtcctaattgtggagaacactacggacgaggaagtggatttgctaattcaatcattggttgttttatcgttggatttgtttgtattggaattggtttctatgccttgtcagaatttctcgagacatttgaaacctttagttttaaatagtaaatgttacatagtaaacaagactattctagattaattacatagttggaggaacgtcatgtttgagcgtataaacaatataatgggtaatttatttggtataggaatcattatcgcaatgtttgtacttgcagtgctagcctttaaggcaatgtttagaaatataaaaagaaagttcaaacctaactctaacaacttaatacattgccaatcttgcagaagtgcaatatctgaagatgctttcatgtgtccacattgcggacatcattacgggagatcaagcgctggtaattctatattttactgtttattggccggatgtggttttttgttgggggcattttatggtctccaactcttctttgaagaagaagaggttcttatttttatccaaacatactttaactaatcgaatacccaataataaaggagccatatatgactcctattttgtaccctaaattcaaacgtgtcacgaaagaatcttttccctgccaacttgacagagacttggctataggcttctactgatccacaatagtcaatgatgtgctcttgttcctctaacacatgccaaaccaccacctgatcctggcttaaagccgccgtgaaaaaatctatgtcctctttcaacaccctatatgtatggttcatactattcacctcaagtaagatatttcttcagctaccactgatgatcctgccatggggtggagttattttatttagaacgaaggtgtggggcaagcttgattagttgccgaatcaacaggccgaaataatgattgttccacaaactacagttaatcaaaatcaggttaattcggatacagtagctagagtatgtaaagcgcagattgataaattggttcagtaagcataactggatttacaacatatcccattgcatatataattctcattataaaatgggacagttcacttacttagttggctaaaatggctgactgggtatgtttttaacgaatattgctgtcttcttatggactactagggggagttaaatttgagttttaagcaacgaattgaaagggcggttactcgactcaaggtgtttgttaaaaagttacctaagtattcatggatagcagttaaaaagttgcagaagtggataaggagaaaagaatatattttaatgtcatttggtttgattatcgcagtaattgcagtttcagttccattcatgataatttatttcaccaatacatcctataccttgaatagttttaataccttgggttctattggagatttctttggaggaactacggtaggtttattgtcactggcaagtattatatttgttactgctgctgttatcatgcagaaagaagagctgcaattacaacgtgaagaggtagaaaagacaagaaaagaatatgaggtcactaatgcaacaatgaaaaagcaacagtttgatagtacattctttaatatgattaatctgcatcataatattttaaaggaaatatcatataatggtgttagtgggagaatagcaattacattattatttgaaaaagtaaaggaagtatacaacaatgaagtccatgtagaatataagagaactcttaagaattactttttattttacgaaaatatatccataaggaacgattttcttctaaaatcaatcttgtttaatctgaaaaatgaatacatatctgctgtacaaagccatgctgaaacctatactgattacgactcttatggaagatcagatcaaaataggcttatttttaaattgacatctatctataaagatacagactcatactggattaatatgaaagaacaagctatggaagaattttatgctaatatgaaagaagaccctgagtatgcattaaaattattagatgaagttgattttgaaggtctgcttaatgctaaaatagaccattattttttagacctttataataaaaataccaaaactgaaccattgaaagatctaaaaatacaatcctatgaagttgtatataatgcaaatgaaaatttaatcggtcattattatcgcaacttatatagaataatcaggttaattcaggatgagacatttgatctagatgaggagaagaatgagaaagagaagaaaaaatatagaggaattttacgagcgcagctttcttcttttgagttaatgatgatattctataacgttgcttactccaaaaaaggtgaaaaatttaaaacttatttaattaatacgaatttcttcgatgatcatttaatacagtctgattttatatgggcgaatgataaagatgagttggcattaataaattaattttattcagtaaaaatatcataaattaattgtttgaagtttgaagcctatactataggcttcttcttatattgaaatctagttgatgtacatgatttgagatttcaattacaatattttgtagtaaatactagggaggaattggattgactaccaatgttaaagatcaagtagaaaaacaagagcaagaagccaaaaaagaagaactaaaaacttgtttcattgtaatgcctatttcgaatgcagatgggtacgatacaggacattttaatagggtttatgactacataataaaaccagcttgtgctgctgctggattcaaaccgtcgagagcggatgacaccaagcacacaaacacaattatcttggacatactagatcaaattgttaaagcagatatggttttatgtgatttaagttcgaaaaatccaaacgtcatgtacgaattaggaataagacaagcatttaatttacctgtagtattgatcaaagataatgcaactccgagagtgtttgacacatccgcattgcgagatattgaatatgatcaaacattacgtattgataatgtgaactcagttgtggacagattaacggaagcattaaaagaaacttataggatgaaagatgatgatactcattccttaataagtatgttaaatattgagcctgcgacacttcctgagaagaaagaaataagtgcagacactgcaatcttattagacgcgattaatactatgaaatcagaactttcattgagaaatgcacgaccggttgaaagactaacgtggggactactagaaaataatgagagtaccgaaaaagtagttagtataggtggagatctggttagtaaaaatattaagttgaaactcccgacaacttttggctcttctgagtaaaaattaatatacacgtaaggaacaggcatctacctgttcttttttttattcaataacacttagctattgcaatacatatggctttaccgtgtatttatggcagacaaacaaacaggaaaattaaggagatgagcattgaccttgaatcagtaccgagatttggcggaccaactgggaggagaggtcggagaacggatcgctgcactggtcgaagaattggaagagtccagaaagatcatacacgagaaaaagtacccacctctccttggtagcaaggaagtagcggaacagattggcgcagatcccaagaacatgcatcatgtccggaagtacaagatgttccctgagcctgacgttatggttgggacaaggcctttctggtttaaaccttcgattgatgagtaccagaaacgaatggaagagtggagaaacaaagacaagccagattaggagttgggtccctctgacagatgaaaactgactacgggtgcttgcgagcccgaaatcgttccaattttactttttgttttcaccttccgcttcttatcgcctcagaccaaatctagggctttttgagcgtgtttcttcaaataatgcccctggacttaagtgttagtgaaatggtgagataacggaagttaagggtagacaatcatgagaaggaaaccttaagagggaaagattgtttaattgatacctgatatcattttgtgttaggaaggggattctcgttgatagagcgaaggtaatatctcagaaggaggagattgccttgctaagcatagtagattacatagctaagagaaagaaagaggacggtcttaatgaatttaattaccaggcgaaggcagaaaatacgagtatctgtgtaaattatgtgtttgagtatttcaacaattatcttactgaaagtgcatcagatgaaaaaacatatctccagtctgagaagcttgagaagtaccgggggcagctagcacagcttgattctgaaacggctgagtggctcgttcaaatgttcgataatcatggtaaaatgctaaatcatgctattaataattttctgaaaaaacaagagctatttctgatctataattctgatactgaattccggagtgtttcctacgagtgttacactttcttgagtaaaaagcatccttatttaagagatcatactgagatgttattcatttatatcaaagagcatcatgggatcaaaagtcaggaaagaaatggagttaaagttccttatattaatgaagagataaataattggctggaagagacatcgagaaagcatcaagtgaacttatggaagtttacttacgactgggtgattaaattttatgaagaagagaagttgtggccagcaacacatagaaaaaaaagtaatgattcttggaggaattacgagtatgactacaagcaaaagagtaatcttttcaatctaaatgaattgtatagaaggttgcctaagaagtccttcattcgaggcaaaaagcaggagttggagattttgatgatgtacaattggctttttgatgtggttggagatgaagagtattgggacgaatacatttctaaagtgatcgagtattcttaatcattatgaaagtgagtccggagttgatgaagcatctaaacgagctattggacacttacacacaggaagtgaagagtgcggggttaaagccgtctacagagaagacatatctacttcacgccgatcatttcgttcgctggtgtaacggggactttgtccctggtactacattaaaaaagaataacaaataagaatatcaaattgatggaactaaataataagggtcttcattaaacgaaggtccttatttctgtccgttaaacggtcaggatgtatagtgtatatatgagtattataagaacaacgtactcgtattttgagtctggcagaatttcatatcatcctgatcggatgatgagtcccctcgtatttatctcctgttagtatctgttacccccgaccttacttgtagtaaccccgccgacttgtactcactttatgagtatgtaaaaattctacatctgtcagattgacagctagagaaattgattggcgcagtaaacagtccataaaaactagaaggaagagtaaggcgcaagatatgtgatttgaaatcacatggtggagtatggaagaaccgacgaaaaagatattatccacttaaacggatagtatcgaataggtgatgaccgtcagattgacggatatgaacccactcctccaaagaaaataacaattgcaagaaaaaggaaacaaccggaggatgtactttcaaagcacccccatgtcgaagatgggagtcatagtaataaggtcatcggctggatgtgacatcaggtttgtagagaaataccctggcgattggtgggccgtcctctctgatgtatcaaaggtgcttggattgaaggcttttaaagtccggcaacgtctttcaaaggatctactttcaaagtatacccttcaaacatcgggtggtcctcaggaaatgatcaccgtaagtgaattcggtatttacgaaacagtatttgaaagccggaagaaggaagccaaggaattcaaacgctgggtattaagacgctacgtcaatcaacaggtctcgaaggattccaagtatttcgaatgctcgacaagaaaaaaacgcacccaattcgcacccaataacggattgagtaatgacattcaatcgttagggatagatgaaaaccttgataaataaggaatttaacaacaaaaagaagccctctttcgagagcttctttttcatgggagaggagaaaccggacgaagagcttatggggaaacgtaagtcttctccgcggttgtctacgacacttgtgatgtcgataattatagaatcgcccgattgtttcctttttatacatatgcgtcaacaattcgtcaacaattttccaagggaaatgaagactgcacatttttcaaactgaacccgagtgtggtacgatagtcgtatcaataaacttacatagagaaaaggtgactcgtcaagtgagagtggtatctgggagtgcaaaaggcaggccgctgaaggctgttcctggcacgggtacgcggccaaccaccgacaaggtgaaggaagcgttatttagcatggttggtccttattttgagggcggcacagcattggatctgtttgcaggcagtggaggtctcggtattgaggcgctgagccgcggcatggacaaggctgtttttgttgatttggaatcaaaaagtattgaagtcatccgcatgaatctgaaggcaaccaagctggaagaccaggcggccgtatatcgtaatgatgcaggtcgggcattgaaggcactcgccaagcgaggcacaacgtttgatctggtatttctcgacccgccatatagcatgaagaacgggcacgagttgatgctgaccatgcacgaattggaacttctggaacccgaagcaaccatcgtgcttgaatatgaatccaaacatgattaccctgagcaattcggcccgtttgaacaaacgcgcaaggctttgtatggggagacggcagtatccatctattattatgcgccagaagcagttgaagatggagaatccattacaccggaagaggaggctcctcatgactgaaatgatacatcgacaggaacggatcgccgtatatcctggaagttttgatcccgtaacgatggggcatctggatattatagccagagcgtcaaagcaatttgatcgcgtcattgtggctgtgttgaacaatatgagcaaaaatccactgtttacggtggaggaacgcaaagaactgattacggaagtaacccgccatctaccaaatgtggaggtggacagtttccgcgatctgacggccaattacgttcggcaaaaggaagctcaggtcatcgttcgtggtatacgctcggtaactgattttgaatacgagttgcaattggcatcgaccaacagcaagttgaatccggatgcggaaacgatatttatgatgacaaatcccaagtattcctatttaagttccagcatcgtcaaagaaatcgctcattatcatggagatgttacagatcttgtctcacctgaagtggaagctgcgctccgtcagaaaatcaacgagaaaaccggcggttaaaccagaaggtaagacccgatagactaaccatgactgcaagaagtaacgcaagacccatgcatgcagcagggaagacactccaaatggtgttgatcgggtatgtgttaccaggactatgtatgaataaccaaccgaatggtgtcgagaggtcttgctctgcattcgtctgtaatgtggtccagacttctgtgctataacggctgaacggcatccataggaacagactgatgaaaaaggcgattaatccatgagtcagacgaactccggcaaagtacaacatcgatttgctgcccggaccagttgttttcaagacagcagagacttgcagatgggagcataaaccaccccatcccagaacggctgcaagtagagacatgagcagcatgggtgttaatgaagtctggctcaaatgataggtgcctaggtgaatctcgaagaaggctggccacagcgcagcagaggacccgggggtcagataaagggagaccagccggataaatacggcaaaaccgatcatgtatcctccagtcatcattaaggtctgcacagcttgggatacagtgtcacctaacagtttgccaaatcctcttccatcacgacgatgggcttctctggctgcaatcatcatatcagaccatatactgcgtcgtttgttcgtagcatggtggggggcagatgagcgacttgtggaacttgcaggacttgcaggctgagaatcaagagagttcttatctgcttgtaaggctgtcgagccaaccctgtctttctgtttacgcggtgctggcaggagacgtgtggcaagaatggcagcaatccagccgctgatccagtggaccacgagtagaaaatatccggccgctggctggtggagaaaagcagcaccaacgaccagtatgatcatcattggattggcaaaatgagatgccgccgcaaggacaaccgcctgcttggcggtaatttgtctatcctgaaataaacgggataccgcatctgctcctgcggggaatccgccgcacatgccaacggcaattgccagacctgcgttgcctgggagtctaaaccagcgttgcattaacggtccgagcaaggcgccgatcgcgtgggtgaagccaaacgcagtgagcatttgggataacatgaggaacgggagcatggcagggaagatgattttccaccatatatccagaccttgaatagaggcatcaaacgcttgtttgggggacgcaactaccgcaatgaccaacattaaagcgccggtacttagaattatcgttcgtaacgggccagaatctctaacctcgctctgtaatgtcatcgtttcacctcatatcagataacgccgatttggcatctgaatcgttatggacggccgaatgacgcccgaagggcggttcggccttgaccggacaggctattgtatacagcggcctatccggcctgtaccattgtatgcacaaggaccagagtgttagacttgaaaaaatgattaaacaagatggaattacgatcgctgattagtgtagagttcagcttatatagagatacaaagaacggaggctcatgcgatgaatcggattcggaaatctggcggattcagagcttcgatctttgtgatcgtggtggctctggtcgtctatgttgccgtgtacatgccaacgccgtatatcatatatatgcctggcagtgcagatgaagtaaaaccaatggtaaccgttaagggtggagaccaggaagaacacggtgtgttcatgatgacaaccgtgtcggcaacatatgccaatgtgtttttgctaggaacctctctgttcaataaaaatgctcaagtggataaaaaggaagatcgactgcgcggcaaaagcgaagcggaatactctgccgaacaggtgtggttcatgagtgactcacaatcctccgcaatggaggctgcatatgagcaggctggtgtgacttactctattgtacctgaacatatctttgtatttggactgtccgaagatccaaaaccggaaggagacattgctccgggagatatcattctgggagtgaacggaacagctacgccggataataccgtgctttctgccgagttaaaagataaaaaggtcggagatacggttgaaatgcaactggaacgtggtggagagaccattagccgggacgtgaaactgattcaggtaaaagacagtaaaacgggtgaaacccgcccgggactcggagtaatgattggtacggttcagaaggtgaaagctgaagagccagacaaacagatctccttcaccgatactcaggttggtggtccgtctgccggcttgatgtttacgttggagatctataaccagttaacacctggagatctgaccaaggggcatcgaattgcgggtacaggtaccattaccaaggagggtgtggtgggtgccattggtggtgtagtacacaagattgtagccgctgatcgaaaagaagcggagatcttctttgtaccgaaggataactataaagaagcagcagccaaggctgaacagatcggcaccaaaatgaaacttgtgcctgtaagcacggtggatgatgcgctggcttatttgaaatccttgtccgtaaaatcataggattttaaacgggcgggaagagatcgagccaacgttgaagcggatggataaagaacggataaaatcggaataattgattacagtggaatgaagtgtgatcaagagttttgagaagatcaacaaactcactagacccaaaggttaaagataaccaaaagaattaagagaacaaaagaagtgaataagggaatccccttgttgcgatgtgcctgagtggcgcgcagcaaggggatttttttaattgtatagttgagtgtggaatagtggatatcaatgacctgtttgataatggaataaaaagctccatagagatgaagccttatggtcaaaagtggatcacactctcacaggcgactcgtagtaatcactgaacatcctgcgtgtgtccctatgctcgcaagcgagcccatacgcaacctgagcttggatatccagttcaagttgattgtgtgtgaacgtcgacggtttcagcacaacaggcagtgtcgcggttttcttcatttgtttaagcaggctctgcccttgagcattaaatccgaggactcggagatatccgggtccggcagccaattgctctggtgaacactcggttttcgtgtgattcaggagcaggtgggcgagcatacgctggagtttggtgcgtgtgtatcgtttggtcttcattgcattcaggagtgcttcgactgaaggctccgggagctgagcgagtgcacggctcagccggtgttccaggccttccgtgacttcggcgatgcgttccagctcggaggcacggcgggtggccgcgaggtgcaacagcggctgtgcaaagcgctcccagtgtatgggagcgcgcccttcctgccattcgcgatgcagaatggcaagggttgccaccggcacgtagggcgcggcggcatcgggtccgtccgccatcagcaggcggcggacagctgttgcactggcgatcgcccccggcccgggcgtcgcctcatgatacgcggcaccggtacgcgccgtcgtaaagggctggatcgcgctgccaagtcgttgcagcgcgatcaggtagtgcagcccaagcgaattgttgggctgctccagcagtgcagcggcgtcgtgagcatcgacgccgccgggcgccagcgctgccgccgcgcctgcgtacgcggcggggtagctggcgccttcccgcaggcggcgcgcgatgtcctcgcgcatccctgcgggctccacagccagcacgcgcgcaatgcgctgcaggctgtccaggtcgccggactcgctgccaaagcagagcgagtccacaacgccggtgcggtgcagcagcgataccgcaccgaaggcaaaccactcggccggttggaccgcgtacgcaaccggcagttcaagcacgagatcggcgcctgcgtgcagcgccatctcggtgcgcgcccttttacccacgatggcgggttcgccacgctggagaaaagggccgctcatgaccgcaacaacggcgtctgcgccgcttagccgccgagcttcttgcaaatgatagacatgcccattgtgcaaggggttatattcaacaatgacgcctacggctttcatgattagacgtactcctttcgattggataaccgagtatgtataacatccattccatcataggggatgtcatgtattagatcaaatcatgcaccaattcagacaagaaaaaggcacaaatccaacatcaacggatgtcagactgtgcctgcaaatctattgtatattacacattttcgataatcggagaaaaggcttctttaacttaataaatcagcacgcttagacactttccggcgcgggagataaacttgctttcggcccaaaaaattcataatgaatgttgtccgctgcaacacctagcgcctgaagttccgtatacactgcccgcatgaacgaaaccggtccgcacagataataagtggaatccagttcattgatcacttggcgaagccagatcgcatctatataaccttccttatgaaaatactcattttcacgatcagcatcctcaggttgagtataacaataataagctttaacgccctgattacgtttggccacactgttgacatgatcacggaacgcgtgcgattgaccattgggacttgcatgcaaaaatgtaatggtgcgattttcattcaatttagccagcgtatttaacatactgatcatgggcgttagaccgacaccaccactcaggagaacaacaggtcgtttatcgtctgcattcagcgtgaagtcgccagcaggagcggatagcttcaccagactgccttcttcaatgtgatcgtggagatacgtggatataactccgtcagggcgctctaatacacctcgctcacgtttaacggaaatgcgatagtagggtttacccggggtatctgaaaggctatactgacgaatctgggtaaatgactgtgcctctggtttgattttgatactgatgtattgtcccggttcataactggcaatgggctgaccatcgtctggaacgaggtaaaaggacgtgatgacttcactttcctgcactttcttggcaaccttgaaggtacgaaatccttcccagccacccgtctggttttccgcttctgtatacatgtcctgttcaatcccgataaaggcgtctgcaatgacattataggcttcgccccacgccgtgataatttcatccgttgccgcgtctccaagtacatttttgatggcttgaagcagataggtgccaacaatcacatattgctcgggaacgatacccaggctgcgatgtttatgtgcaacttgccggacggcaggcaggatggaggacagattatcgatatgcagggcagcggtgtataccatattggcgagggcggcttgctgtcgtccctgtttctgattttcgtgattgaaaatattcagtagttccggatgagctgtgaacatcgtttcatagaaatggcgtgtgatagcttccccgtggacttcaagtacgggtactgtagatttaatgactctaattgtgtgctcacttaacatacattttccctcccgatatgatatgaaatagttggataataaatcggtcatggagctgatcgtgcttcggtttatagcaagtatagataggggacaagcgggtctatgtgagatagatcacactaaacgttaacgaaatgtgaccggtgtttgcaaggaactacaactaaaatgacgacttgtgatttatcttaaagtgagtctataatagaccagatggagtaaatgtctgtgcggtcagtgtttttaaaaagggtgtaaagttaaaagtgttgacaaacgtcttgaaaaatcggtataatgatttttgtttgttaagtcaatttcataatacttttaacgaagattcgtcagaatacatacagtcaggatttattgctttacaaaagcaggcttgacctgtataactgtcgtgatacgtttgatacgaattatgaaattggtttcgtttggagtgatggaaatgttaatgccatttcgcaaagtggctaccagtgatggtcccctgaagtttaacgaacagtgggagatcaaggaactggtttctaaccgacaagatatcacagccgttaccccgctgactgcggacttatctgcagaattcagagaaggtgacgttgtggatgttcatggcaagctgactgtaggagtggacatgttgtgctcccgttgtcttaagccgatcaatgaacattttcatattgattttcatgagcaattcaagcagggaaaacagccagagggattacacgaagacgatgatacgctctatgtggatggagatagcgttgatctgaagggttatgccgaggaagcttttctgctggatcttccgtttataccgctatgtagcgatacatgcaaagggttatgccccaagtgtggccatgagctgaacgaaggtgactgcggttgtgataacgaggttattgatccgcggcttgcagggctcaaggatttttttaaatgagcatgattgaaaatcgaacattttaagactacctgcaaaggttgattttgataaggaggtgggaataatggcagtacctcaacggagaacgtccaagacgcgtcgcgacaaacgtcgcactcactttaaattggctgtaccgggcatggtgaaatgtgaacaatgtggcgaacttaaacttagtcaccacgtgtgcaaagtgtgcggaacgtacaaagcaagagagatcatctctcaataatagttggacattaagtagcacttcatttcgatgaggtgctactttttttggattagagagtgtaagtagagtgagctaactagcatgaaatccttgtaccagaagggtgaattgtttttgttaggccagtctttctttttgacacgggatgagatatactatagtttagtaccaggttctaagatttgacgttacatatagatgaaccgtaatccgtttgagaacgaccctggtgaccagggatgcaactatagaagcaacacgaaagaatggttgaactggccggacgggacggttccgtaaacgatacagcggggggtgtcaggcatcgaacgtgtaccgaagagacagaggcaacagcagttaaccagaatgatagaagagaacccgtttgtgacggatcaggaacttacacgccaattgaaggtgagtattcagacgattcgtcttgacaggctggaacttggaatacccgaacttcgggagcggatgaaactgatggcagagctctcgtatgatcaggtacgctcgttgcccttgcatgagattatcggtgatattgtggatctgcaactggataagagcgggatttccctgtttgagattaaggaagaacacgtgttttccagaacagggattgcacgcggacactatgtctttgcacaggccaactccttggctgtagcgattattaatgacgagatcgcgttgactgcatcagcagacattcgctttgtccgttcggttcatttgggagagaaatgtattgcaaaggcttatgtgagatcgatcccgggtcaaaagggcaaagccaaagtggaagtattcacttatgtaggtgaagaaatggtgtttcaaggcaactttgtaatctaccattcaggtggagaagacagcggagaaggaggtcatttggaatgaaaatcgtcattgatgccatgggaggcgacaatgcacctgcatcaacggtagaaggtgcgattgccgcagccacggaatgggcggatacacagatcgtactgatcggcgatgaagccaagctggagcctcttttgagtcagtcaggtgtgagacctgccaatcttacggtccggcatgcttccgaagttattggttcggatgatgaacccgtcaaagcagtgcgtcgcaaaaaggatgcctccatggtggtcgcaggccgcatgctgaaagagggcgaagcggacgcgatgatctcggcgggcaatactggagcgctcatgacagcgggtttgcttgttgtaggtcgcatggaaggcattgaacgtccggcgcttgcgcctatgattccaacgattgatgatgtaggtgtgcttgcgctggatctaggagcgaatatggatgccaaaccggagcaccttgcacaatatggcttgatgggcagtttgtatcggcaaaaagtacagggcattgagtccccacgagtgggcttgctcaatgtaggaacagagccaggcaaaggaaatgagttgaccaaacatgcataccctttactggaacaactcccaattcgttttgtcggtaatgttgaggcacgtgatgtgctgactggtgcttgtgatgtgcttgtatgtgacggttttgcagggaatatcctgctgaagtcgctggaaggcacagtaggtgccattttcgccttgcttaaggaacaattttcatcttctctcaaaagtaaactggctgcagctgtactaatgcctgagttgcgtgggttgaaacgaaagctggattatacggagcatggcggagcgccactcctcggtttgagcagactggttgtgaaaagtcatggatctgctgatggcaatgccatcaaaaatgctgtgcgccaagctcggattgcagtgcagaatcagctggtagagagcatatctaaggaaattagcgggaagtgagtgaggatatgaataatttgcgcccagtaggggttattggtacagggaaatatgtgcctgagaaaattttgacaaatagcgatctggagaaaatggtcgataccaatgacgagtggatcgtcagtcgtacaggaatcaaagagcgtcacatcgctgcaccggatcaggcaacttctgatctggcatatgaagcggctattaaagcccttgaatctgcaggcatgacaggtagtgatcttgatctgatcattgttgcaaccattaccccggattcttcgttcccatcgacagcctgcatcttgcaggacaaattgggtgcaaaaggtgccgcggcatttgatctgtcggctgcttgttccggatttgtatacggtttggctagtgctacgagcttcatccaaagcggtatgtacaacaatgcacttgtgattggtgcggactgcttgtctcgtattacggattatacagaccgtaacacatgtgtcctctttggtgatggagcaggcgcggtagttgttggtgaagttccggaaggtcgcggattcaaagcgttcgatctcggtgccgaaggtgctggcggtagtcttcttcagatggaaggcggcggttcccgtctgcctgctactgcagagaccgttgaaaataaaaagcattacatcaacatgaacggtcgtgaagtgtttaagtttgcggtacgtgtcatggggacggctaccattgaggtattacgcaaggctggtatggagcgtacggatgtggatctgtttgttcctcaccaagcgaatattcggattattcaatctgcgatgcaacgacttgaacttcctgaagaaaaggttgtagtcaacgtggataagtatgcaaacacatcggctgcttccataccgcttgctctggtagaagcagcggaggaaggtcgcatgaaagccggagataccgttctgatggttggattcggtggcggtttgacatggggtgcatcggtactcgtttggtaaaatagacatctgggagatgaatgagatgggtaaaatagcatttgtatttcccggacagggatcacaggctgtaggcatggccaaggacgcgtatgagtccgtgcctgccgcaaccgaaatttttcgcacagcagatgaaacattgggtttctcgctgagcaaccttgtatttgaaggaccggagaccgagttgaaacagacatcaaatacacaaccggctctgttgacagcaagtattgccttgctggaagctttcaaagaaaaaggaattcagcctgactatacggctggacacagtctgggagaatacagtgcactggtggcagcgggcgttctttcgtttgcagacgcagtgagcactgtgcgggcacgtggtcagtatatggaacaggcagtaccgggtggacaaggagcgatggctgctgtgttgggtgcggatcgggaagcgctgggggtgctttgccgtgacgtatctgaaagtggtcatgcggttgaacttgccaacattaattgtccgggacaaatcgtcatttctggtgtgaaggaaggcgtagctgctgtcgcggaacgagtgaaagaagcaggcggtaaacgcgccattgcattggaagtaagtggtccgttccactcttcattgatgaagggtgcagctgataagctggcagagaaactgaaaaccgttacgttctcaccggcagcggtccctgtagtcgctaatgtgactgcaagacctgcagaggatggacaggttcaggatttgttgacagctcaggtctattctcctgtattatgggaagacagtgtgacatggcttattgagcaaggcgtggatacgttcatcgagattggatctggcagtgtattgaccggtttgattaaaaaaacagataaaaccgtaaaactgtacaatgtgaacagtcttgaaacgctcgaagcaacggcaagtgaattagaaggaattatatgagttaaactaaactttttacacgagaacggagaggacagaaaaaaactgaagaagcggagcgttcgcctttatcaccggattttccctttataaaagggaatcaaaaaaatctggggataacagcgatcggaagtttattctgtcctcggagtggcaagtgtaaacattctttggttgaactgatatagatttggggaaaggaggaatgattatgtctaaaccattagaaggtaaaaatgcacttgttaccggggcatcccggggcattgggcgcagtattgcactggcacttgcagaagctggagcgaacgtagccgtgaattatgcgggtagccaagcggcagctgaggaagtggcggaagcgattcgtgccaaaggagtcaaggcgattacacttcaagccaatgttggcctgatggatgaagctgaacaaatggtcaaagctacactcgaagcatggggcaacgttgatattctggtgaacaatgccgggattacccgtgataatctgatcatgcgtatgaaagaggaagaattcgatcaggttattgaaaccaatctcaaaggtgtgtttaactgccttaaggcggttacacgtccaatgatgaaacaacggtcgggaagaatcatcaatatctcctcggttgtaggtgtgctcggtaatgctggacaagcgaactatgttgccgccaaagcaggagtcattggtctgacaaaggcatctgctcgtgaactggcttctcgtggaatcacagttaactgtgttgcaccaggtttcattgagacagatatgacaaaagagttgtcccaggagctggtggacggtatgctaagtggtattccgttgtcccgtttgggtcaaccggatgaaatcgctggtgtagtcactttcttggcttcacaggcttcatcttatatgacagggcagacgttgcatgtcgatggtggcatgtacatgtaattcttcccggacttgaacaatagtcggggaacaggcgctggacgatccgaaatgccggaaaaaggccgggttccccggccgggagccgcatatgtcttctatggcattttgcctgcgattctcgtataataccaaagaaggaggtgaaccggatgtccgatgtattggagcgtgtaaaacgcatcgtcgtcgaccgcttgggcgcagacgaagctgaagttacacttgaagcatctttcaaagaagatttgggtgctgattctttggatgtagtggaattggtcatggaattggaagatgaatttgatttggaaatctctgatgaagatgcagaaaaaatcacgaccgtaggtgaagttgtaaactacatacaatctcatacctaaagtcatttttagtcccgcacatgttttcgaacaggcgggacttctcatcattcattggtttttctcattccgcaagcagctctactcaagcaggcctatcttggttgagtagatgtctgtttgcggatattcccacaaaatacttgcgtaatgcagtcgatatagaggtgactcggtttgaaacaaagagtagtaattaccggaatgggcgtaatgacatcgctcggaaaagatttggaaacgttctggggcagtttaatggcaggaaagtccggaatttctcagattgaggcgtttgatgttagtgaatacacgacacagattgcagccgagatcaaggatttcaacccggaagaatatatggatcgcaaggatgctcgcaaaatggaccgttttgtacagttcgctgttgcagccggcttcaaagccgttgaagacagtggtctgaaaattaacgagaatattgatgcagagcgtttcggtgtatccatcggatcaggtattggtggattgggtacgtgggaggaccaacataatgcattattgcaaaaaggtccaaaacgggtaagcccattctttattcccatgatgatctccaacatggcttcaggccaaatgtccatttctcttggtgccaaaggtcctaacattaacgttgttaccgcttgtgcaacaggtacacactccatcggagattccttcaagctgattgccaatggtgatgcagatgccatgatctgtggtggtgcggaagcaacaatcagaccaacgggtcttgcagggttctgtgcgatgcgcgcaatgtctacacgtaatgatgatcctgcgaagtcaagccgtccttttgatacagaacgtgatggttttgttatgggcgaaggcgctggtgttatgattctggaatccctggagcatgctcaaaaacgtggtgcacgcatttatggtgaagtgatcggttacggtctgacaggcgatgcacatcacatgacagaaccagatccggacggagcagcacgttgcatgaagatggcacttcgtaatgcgggcattgagcctgaagaagtggactacattaatgcacacggaacttcgacgcctgtaggcgacagatccgaaacgcttgcgatcaaaaaggcgtttggtgatcatgcgtacaagctcgccgtgagttccactaaatccatgacgggccacatgcttggcgctgctggtggtgtagaggcggttatctgtggattgtcactgacacatcagacactggctccaacgattaacctggaaaatcaggacccggaatgtgatctggattatgtaccaaatgttccacgtcaaaccaaagttaatattgccatgtccaattcatttggattcggcggtcacaatgccaccattattctcaaaaaatttgaagcataaggggctagttcgtttgagtgaagatctgaagcagttacaacataaacttcaaatcaaatttgacaacaggcagcttttaaaacaagcgtttacccatgcttcttatgtaaacgaacaccggttcagtcagcatcaggacaacgagcgtctggaatttctgggcgatgccgtgctggaactgactgtatcggagtacttgtatcatttgtatcctaaccgtccggaaggtgaattaactaagctgcgggcatccattgtctgtgagccttccctcgtcaaatttgctgaagtgttgggttttgggcagtatgtacttcttggtaaaggtgaggaactaactggaggacggacacggccggctctgctggcagatgtgtttgaatctttcattggtgcattgtatctggatcaggggcttgcgcctgttcggacatttcttgatcagcatgtcttcccattaatcgtattgggcagcaagctgcaaatgagtgattacaaaacggaactgcaggaacttactcagcatcacaatatgggagctttggaataccgtatcgttgaggaacggggacctgcccatgaacgtgagtttgtctcggaggtccatatgggtcaagaaaggcttggcagaggtacaggacgttccaaaaaggaagcggaacaacaggctgcatctgcagcacttgatcgactgaagcttccggaagccggagcttaaccgatagcgcatagacaaacgaagagcaaagagcagcccgcgggtccgccccggcggaagtaatcggccggactgctttttgctcttttttttgtaaagaggttcaggagaagtttacctgatcgttaactaaataagtgaactttattttagttcaatttagttaggcgcttgaatgcaatacttgaaatttgcaagaggaggtgacgagaaaccctatgtttttaaaacggattgaattgggtggattcaagtcattcgccgacaaaacggagatggagttcgttcgtggcattacggctgttgtaggtccgaacggaagtggcaagagtaatatatcggacggaattcgctgggttctgggggaacaaagtgccaagtcgctacgtggtggcaagatggaagatatcatctttgcaggcagtgacgcacggaaggccgttaatttcggtgaggtgtcgctaacgcttgataacgaagatcacgcacttgcattggattttggtgaggtgacggtgactcgtcgtgtacatcgcagcggagatagtgaatattttattaacaaacaatcttgtcgtttgaaggatatcacggagttgtttatggataccggcatcggtaaggaagcctactcgattattggacaggggcgaatcgaagagattctgagtacccgttcagaggatcgcagaggtatctttgaagaagcttcaggtatcgttaaatataaatcccgcaagcgggatgcgacgcgcaaactggatgagacagagcaaaatttgctgcgtattcatgatctggtgactgaactggaagatcagattggaccgctaaaggaacaatcggagaaagcgatccactataaggaacttcgttctcagctcaaatcgcaggaaatttccatgtatgtgtaccagatcgaacagattcatgcgtcctggagtaaggcgaacgagcgcctgcaatcgctaaaacaggaagaggttggactggcggcgattgtctctacgcatgatgccaagctggaaaatgatcggaatgcgctgcgtatcctggaaacagagacagagcaactgcaagccgctttattgcaattcagtgaagcgacagagaaaagtgaagggcttggagaattgctcaaggagcgctcccaccatctgcaaacaaatcaggagcagctcaaagtaacgcttgccgccagtgaagagagacatcgcgaacgggaaaccgagctgcttgcactgcgtgagaagtttggcaaacttgagcatgaactgaatgatgtgagaaatcagttgtcccaggaagaagccaaactcatcggtgttacaggtggcattagtcaacagcaagaggaaagcctcaaaggaaatttgctggaactgatgaatcagatggctcagacacgcaatgaaattcgttatgtggatcagcagaaagaaacgctggagcgcagaatgaatcgcgcggctgaagaatcaggcaaatgggaagatcaaaaagagacactggaaagtcgtaaagcggacattgagaaaaaagttgttcgtttgggcaaagaaatcagtgatctacgtggtggatacattacggaaagtgaacgactccagtcgctgcagaagctgctcgaagaaagtcggggtacggtccgtaaatgggaacagaagcgtgaagctcaagtttcccgccgcgatacgatgaaagagatgcaggatgattttgacggattcatgctgggtgtcaaggaggtcctcaaggcttcacgcaaaggtacgctgagcggtattcatggagctgtggctgaactcgtcaaagttcccgagaagattgaacttgcggtagaaacagcaatgggagcatccttgcagcatgtagtcatggaaaatgaatcagtttccagacaggcaatcgctttcctgaagcaacgccagttggggcgtgcaacgttcctgcctctggatgtcattcgtcctcgtgccattggagcagctgaacgttccatgatcgaaggtatggagggttttgtggggatcggtgctgatcttgtacaattcgaatccaagtacgcttcaatcattggcagtctgttaggtaatgttattattgccgaaacgttggaggtcgccaataaaattgcggctcgctgccagtatcgtttccgggttgtgacacttgaaggtgacgtggtcaatgcgggtggttccatgacaggtggtagccagcacaagaaaaatgtgagtctgctcagccggaaacggcagctggaccagctcgaccaggatattttggatacggaaaatcaaatcgtgaaactgcatcgcagtgtggatgatgtaaaagtccaactggagcagtgtcaggacaaactggatgaacttcgtcagtccggtgatgatacccgaaatgcagaacagcaggcttcgatggaaatgaaacaggtagagcatgagcttcgccatgtgcttgaacaggttgccgttgccgggcaggagaagagcggctttaccgaagagatcaaagagctggatacagctcgcatcgtcgctgtgaagaagctggagcagcttgaagaggaagaaaaagcgactcatcgtgccattcatgcagctgagtttgctcggaaagccaatgaatcggcgaaggaagaattgcagagccaactcaccgaattgaaagtgcgcgaaggcaagcttgatcaggagcgattctctaatggagaacaattgcgacgtctggagcgggaagtagagtcgctggtgaaagatcttcgtcagaatcgcacgttgctggcttcgatggaagcagatctcaagaaaacacagaccgagagtgttaagcagattgaagatctgaaccagtacaaactgaaaaaagcggaagcttcccaggagctggacttcaaacgtgctgcccgaagtgagttgtcgaaaaagcttgagcttgcagagagcgaaacgaaggaacagcgcacgcagttaaaagctgtggaagagcagatgcgacagacggaaatttccgtgaaccggctggatgttgagctggaaaatatactgcgaaaactgacggatgaatacgaactgggctatgaactggccaaagagcgttatcctgtaccggaagacgtggagcatacacaggcagaggtacagaagctgaagcgcagtatatccgccctgggtgatgtgaacctgggagcgattgaggagttccagcgagtcaatgagcgatacgaattcctgagtgaacagaagaatgacctggtggaagctaaaacaacgttgtatcaggttattcgggaaatggaagacgagatggcgaagcgattcaagattacgtttgatgccatccgccgtgagttcggtaccgtgtttagcaagctgtttggcgggggacgtgctgaccttgttctgatggacccggagcgcttgcttgaaacgggaatagatatcgtggctcagccaccaggcaagaaactgcaaaacctgcaactgttatccggtggggaacgggctttgacggcgatggctttattatttgctattctgcatgtcaaaccggtaccattctgcgtgctggatgaagttgaggcagcgctggacgaagctaacgtggtacgttttgcccagtacttgcgtgaattctccgaacagacacagtttatcgttgttacccatcgtaaaggtacgatggaagaggcagatgtgctgtacggtgttacaatggaagagggcggtgtatccaagctcgtttcggttaaactggaagatgaggaagcagtaattgcctgatctgatccaaacctgcgagacaaacgaactcattgtaatcattgaaaatcattcagattgagcatttttgcaaaaccgcttagattatgtacacgatggaggggctttatgagtttttttaaaaagcttagagacagcattgcaagcaaaacggagtcggtcaccaaacagtttaaggatggattggaaaagacacgtaaagggttagtggaaaaagtgtcggatctcgtaatccgtcgcaaaaaaatcgatgaagagttctatgaagaactggaagagattttgatcggagcagacgttggtgtgaatacagtcatgaatctgatcgaagacctgcgcgttgaggtgaaaaaacgcaaaattgaggatgcggctgagctgcagcctgtattgtccgagaaactgacgggtcttcttcgcggtgaacagaataacgaattgaaaatgaacccggatggcattaccgtcattttgtttgttggtgttaacggtgttggtaaaacaacaacgattggcaagctggcacatcgatttaaacaacaaggtaaaaaagtcatcatggcagctggagatacgttccgtgccggagccattgaacagctggaagtatgggggcaacgtgccggtgtcgatgtgatcaaacagcaatctggttctgatccagcagcggttatgtatgatgcggtacaggcagcgaaacaacggggtgcggatgttctgctctgtgatacagcaggtcgtctgcaaaataaatctaacctgatggacgagcttaacaagatctatcgtgtcattcagcgtgaaattccggatgctccgcatgaagtactgatggtactggatgcaacaacaggtcaaaatgctttaaaccaggctaaacttttcggtgagaaaagcggtgtaactggcctcgtactgacgaaactggatggaacagccaaaggggggatcgttgttgcgatccgtcaggagctggacttgcctgtgaagctcgtaggactgggtgagaaaattgatgatctgcagccgtttgattcggagcaatttgtgcatgccttgttcgccggattgatccaggaacagccagcggaaagtgctgaagaagaggaagctaattcctagaatcattaataatagaatgaattaataatgttaaccgtattgccagtgatatacgtgataagtgtcacgtgtaatgtcactggcaatacgtgtataatggaggaataaagcaggcaatgttaaagggttagaaaggacggttgaaaatggccaatacgtatacctattctcgccgtgaagaagtcgccaatgcggtgacacatggaatcggcgctgcactcagtgtagctgcactggtgatattgattgtattttcaagtatgaaaggcacggcttggcatgtggtcagtttcacgatctacgggatcaccatgctgctgctctatacaagctctacactcgtgcatgcatggaaagatggaaaagtgaaagatttatttgagattttcgaccattcttccatttatttgtttattgcgggatcgtacactccgcttttgtttattgctgttcgcggtacacttggatggaccctgtttggtataatctggggtatcgcattattcggcgtgatctttaaggcattttttacgaaaaaatttctattcatgtccacgattttctatattgcgatgggctggctcattgttattgcctggcaaccgcttatggctgccattcctacaggcggcattgtgctgctggttgctggaggcctgatgtatacactgggtacgttcttttatgtatggcgtggatttccgtaccaccatgcgatttggcatctctttgtgttagcaggcagtattcttcatttctttatggtactgctgtacctgacaccacttcgttagaacaccatagacggatgcatctccacggactgagacgcattcgttttttcttctacatagaggcggctcgcagggacacggatagaatttgcttgtagtgaaaaagggtataaaccatccgttaaacatcgaaataacgtatcatcagagctgtttttattgtgacaagtatttttgcttgacaacctgatttgttttaggtattattaggaacgttgcaagagtgtaaagtgtttttccttgacgaagggagtgccccgatgtgagtcaagaaaatcggcttgagaagacaaaccggattaacttgctgtttgctttttatgaattgttacttaccgagaaacagcagacttttctaaagtattactttcatgacgatttctcacttggtgaaattgcagccgagtttgagatcagccgccaggcggtatacgagcatatcaagcgtgccgaacaagtgctggaaaattacgaaagcaagctgggcttgctggaaaagcatgaacggcgtaatcgcaatcttgaagatttgcaaaatgcattggaacgcgcaggcgtctccattgataacaacaaacaaatacacgatatcgttgctcagcttagtgaatgataattggctgagcggaacgtatcggtcttgaaaacagtattaaagcttaaggaggtgggatcatggcatttgaaggattaacgacccgattacagaatgtgttcagcaagctgcgcggcaaaggcaaggtgtctgatgaagatgtagccgaggctatgcgcgaggtacgtctggcattgctcgaagcggatgtaaacttcaaagtggtcaaggaattcatcgccaaggtgaaagagaaggctgttggcaaagaagtgatggagagcttcacgccaggaatggtcatcatcgacatcgttaacaaggaactaacggatttgatgggtggaagccaagcgaaactggctaaagcgaacaaaccgcctacggtgctgatgatggttggtttgcagggtgctggtaaaacaaccacatcgggtaaactggctaaaatgctgcaaaagcaaaacagcagaccattgcttgttgcaggagatatttatcgtccggcagcgatcaaacagttgcaagtacttggcgagcagatcaaagcgccggtattcacactgggagatcagacaagccctgttgagatcgcacgtcaaggtctacaacatgccaaagataacggtaatgactatgttattatcgatacagctggacgtctgcatgttgatgaagaactgatggaagaacttcgccagattcacagcgtagtgaatccggatgaagtactgcttgtcgtagacagcatgacaggtcaggatgcagttaacgtagcagaacactttaaccagcagcttaatctgaccggggttgtcctgaccaagctggatggagatactcgtggtggtgctgcgctttccgtcaaagcagttacgggttgtccaatcaagtttgcttcccttggagagaaacttgacgctttggagccgttccacccggaacgtatggcttcacggatcctcggtatgggtgatatgttatctctgattgagaaagcacaattaaacattgataccgataaagccaaggaaatggaacggaagatgcgtaatgcagaattcacgtttgaagatttcctggagcagatggatcaagtgaaaaagctgggaccaatcgatcagatcatggatatgatccccggcatgggcaagatgaaacaagccaaggatctgaaggttgatgataaacagatgggccggatcgaagcgatcgtttactcaatgacgaccgaagagaaacgtaacccggacatgatcaaccatagccgccggaagcgtattgctaccggaagcggaacatctctggctgaagtaaatcgtctgatcaagcaatttgatgagatgcgccgcatgatgaaacagttctcggatatgatgggacctaaaggcggcggtaaaaataaagctatgaagcagcttaaaggtatgggtaaaggaatgaagtttcctttccgttgatttaagcgaagctggatcatatacagatttcattgaaggaggtgaattttcaaatggcagttcgtattcgtctgaaacgtatgggtgctcacaaagctcctttctaccgcgtagtggtatcggattcccgttccccacgtgacggtcgttttatcgaggagatcggttactacaacccggttgaacaaccggctgttgttaagatcgatgaagataaagcattggcatggcttcaaaacggtgcacaagcatctgacactgtccgcaacttgcttagcaaagcgggcgtgatgaagaagttccacgagtctaaattatctaaataaagtgctgattcggagggtcatctatggaagaattagtaagcataattgctaaggctttagtcgatcatccggaagatgtgacggttcggacggttgagaaagaccggcttgtcgtttatgagttaaccgttcatcctgacgatgtcgggaaggtaattggtaaacagggacgaatcgcgaaatcacttcgtacggtcgtcacatcagcagcagttaagatggataaacgggttaccgttgatatcatatcttaaagatatacgaaagggggttaggatgcatgtcctagccccttttcgtgcatgctgaacttaatatgttgaattagatattgaattaaaatattttgggtatgagtgacttcggagcagtgcacggacgggatcgattctggagaagcgttagcgttcgcctttatcacctcattttcaccttttaaattaagttcgaaaaatgagggggtaacagcgatcgaaagaacgaaccgtcgccggaacgaccgtacgagagtcgaagtagctgtttagtttgatttaatttcgtaggaggaacgtatggcagagtttatgaatgtaggtaaaatcgttaatacgcatggaattcgcggtgaggtgagaatcatgcctataaccgatttcccagaagttcgtttcgcgaaaaatgcagagttgtttttctttacaccagataatcatccagtcatggttaacgtggaatctgcacgtttgcataaaaatatgtatattcttcgtctgaaagagtatggcaatattaatgaagtagagaagtttaaaggcggtatggccaaagtgttaaaagagaacctcgctgagctggaggaaggtgaatactacttccatcaaatcgttgggtgttcggttatcaccgaagagggtgaaacgcttggaactatctctgaaattttgactccgggtgccaatgatgtatgggttgtcaaaacgccagcaggtaaagaagtgctgattcccgttattgatgatgtagtacttgatgtggacatcgaacagcagcaagtgaagattcacctgatggaagggctgctgtaacatgaaagtggatgtattaacactattcccggagatgtttgatggcgtattcggagcaagcattctgggtaaagcccaaacgaaggggctggtgtccctcggtgcaaccaacttccgtaattatgccacaaataaacataatacggtcgatgatgctccttacggtgggggtggaggcatggtgctaaaaccagatccgatctttgctgctgttgaagatgtactggagcaacgcggagaagccgcggcaaccatgaaagctccacgtatcattttaatgtgtccgcaaggtgagacgtttacacagaaaaaagcagaagaacttgtacaggaagatcatctgatttttatatgtggacattatgaaggttacgatgagcgaattcgcgaatttctcgtgacggatgaactatccattggtgattacgtgctcactggtggggaattgcctgctatggttgcgatcgacagcatcgtacgccttattcccggtgtgcttggcaatgagacaagtgctgtgacggattcattcagtactggactcctcgaatatccacactacacacgtccacccgagtttaggggcatgaaagtaccggatatgctgttgtcgggacatcatctgaacattgaggcatggcgcagagaacagtcgttgcttcgtacgctggagcgcagaccggagatgttggaaacggctgatttgacggataaagaacgtatttggttgaaaaagatacgctcaaaccgtaaacatagcacagaataagtatatgtatcgtatagacacgtaaatatatttttttatagagtttgaaaatgccaaccttgataccaaaggttggcttttcttatgtgttttgtaaagaaagctggatattcaatgggttattctataaaatggaggtatattttaaaactcagtttcactaaatgaaactaaaggcggtgtatgaatgaattacaatattattggtcttgatcatattcagctcgcagcaccagaaggctgtgaagaggaggcacgtcattttttcaataaagttctgggctggacggagatccccaaacctgaaattctgagaaaacggggtgctgtatggtttgagtgtggtggacaccaagtgcatattggcgtacaaaaagattttattcccgccacaaaagctcatccggcttttcatgtacaacatttggatcagttacgtgatcatctcattcataaccaaattcatattgtcgatgacgaagcaagggcagatgaaggtgtaagacgtttctatataaatgatccttttggcaatcgccttgagtttttagagtggggttaaaatcattcgtttaaatcgtttaattacgtaggcacttttttgcagctttgaacatttttgcatgaccacataatagggttgtgaaaaactgggattttatttatggtgaactcagctggatttgaataacaacgaaaagctgaggaggaagatgatgagcaatcagcctaatgaaatcgccagactaaatattagccaagccggagaacgctgcaaaatgcttttgggagatctaaacggggatggcagacttgaaatgttgctggtacaggcagatgggggtatagacgatcggtatgtcccgcatcaggtatgttgtttgactgcgtttgatctggaaggaacattactatggcaggtcggaactcctgaacccgatgcagggggtccgggttcagactatcccgctcagatcgcagattgggatggagatggaaataatgaagtattgtgtgtcaaggacaaacaatttctcgtgttggatggccggaccggagagattaaagaaacacgtgatctgccaggtgatgaagcacatgactgcattattctcaccaacctgacgggtaaccagcagaaaatggacattatactgaaagaccgctataagacgttatgggcactcgaccatgattttaatttgttatggaagcatgaagggaatccgggacattttccatgggtatatgacatcgatggagatgggaaagatgaagtgatggccggatatgacatgctggatcatgatgggacgttgttatggtcttgtcataatctcgatgatcatgctgactgtatatggtttggcgacgttgatggtgatggggaagtcgagattgttatcggtggcagtgttacggtcatgatggaccgctatggaaatgagaaatggcgttatgaagattcgattgaatcacagcatattgcattaggtcatttttgtactggaatggaaggtttacagattgcaggcctggaccggattgtccgaggggatgagcatggtaaggatggaatgttcatgctggatagcgctggtaaagaaatatggaaagaaaaccgcacaactcggggctggttaaccattatagagcctgtgtgtaactgggatgagggtggactcgattatattttggcgtatcgccgagggggagatgtgttgccttctttggtagatggagatatgaaaacggttactgaattcccgaaagagggatatgcggtacatgcagacctggttcagacggggaaagaacagatcatcatctatgacgcagacgaagcagtgatttattccagctctccgatgacattatcacttaccgatgcaaaaagagccaagccacagcttaaaaggctgtataactcgactttgtatccgggcggtgaagttaaaatctaggttttactggtcattctccgatgcagatgattcgttctgcggactggattcgggttgaagcaaggtcgccaaatcagtacctgtcgtgaccgtcaagcgaggcagcttcatgggatgatctcctggatgcacaaatccagactttacggtaaaggccatgcgatatccatgttgctgtaacttgtagatcatctgtgtactggtataaccaaaaggataggccaaataaggagtgtctattccggtttccttcatttgctggatatcatcatccagaagactggtgtccagaccgacaggtacactgttcccacagcgcataaatcccttatgatgcaggttataggtatggctgttgaactcaaatacgtcggttgctgcctgcatctctggtttggagatgaaactgttaatggcgggctcaaattccgaaggttgatcttgaattttactgcctatgacaaacagcgaggcatgaaaattatatttctgaagcacagggtaagctaatgtataattgttctggtatccatcatcaaaggtaatcacaatggacttctgtggcagggaaatcttcccgctaacatattgctcaagctgatccagtgtaatcgtttggtagccttcatcatgcaggtatttcatattttgctcaaaatcctccagattaatgatggatttattatctgtctcttgattattcaatttgggctctatgtaatgatacatcagcacaggaacttctgtagcggtaccttgttcaattctaaaggtagaacgatccagcgcagattggttataaaagtcagtgtgtgacagctcgaatgctttgcgtttgactatgtcccaggatgtgcaggctttgtgtgacagtgcattcgttgggtgagttacggcatatgaatatagtgtaatggagcatgtgagcatggcgggtagggcaagtgtgatctttttccaatatttcatgagtcttgggattctccttttaaagtggtcaataagttatatcatagacgatattactacatcggaagttacagtattttttcctgtatcaggttgacttgcagatgagagcgttgattcactttccatacgggagaatgtattttagaatgaagttaacatgtgatggatgagtttcagagtggcagattgaacaataggcatttgtttaatttctcttgtgttttgatatgctgcgtgatacaataagtctgttatgtggaatacggcggtcctctatggatgatgaaggagacaaggtgatctctggaagaagtatgaacgcctgtatggaaggagggagtcatagatgaatatcgttcaagcgattacacaagaacaacttcgcaaggatcttccgagttttcgtcctggtgacactttgaaagtgcacgttaaggtaatcgagggaactcgcgagcgtatccaattgttcgaaggtgttgtgattaaacgccgtggtggtggaatcagtgagacttttacagttcgtaaaatttcttacggtgtaggtgtggaaagagctttcccgcttcattcccctaaaatcgatagaatcgaagtggctcgccgtggtaaagttcgtcgtgcgaagctttattatcttcgtgaactacgcggtaaagcagcgagaattaaagaaattcgttaatataacggataccggggagggcttggagacaagcccttttcgtttttgtccgggaaaagttgaaccggaggtacacttccgagtagaatggtatggcaacacatgcggggaatagtccgggaggcttgtaaaatcagttattgaagtgcgtgttcaaaagaccggtttcagtaccgactttttgaacaacctcttgaaggcatttgaattgtggattaaatgtactgtaatgcttggtgaaagattacataactgatgtgaatgttttgtatccatccattgagttattggaacgatacagaatgctggatgtgtgtactgctataaacatgtactgtgaagagaggaagatcttgaatggaacaagaagttcaacatgaccagggcaatcctgccgaagagaaaaacagtcgatccaaaaaagccaaaaatgaaattgttgaatggcttaaagccattgttatcgcattagttctcgtcattctcattcggtggttgctcttcaaaccgtttgttgtggacggtccgtccatgcagccgaactttgaaacgggtgaacgtgtgatcgtcaacgaaatcttatatgatatcagagaaccgaagcgcggtgaagttatcgtcttccacgtaccatccgaaggtcgagatttcattaaacgtgttattgctgtagaaggtgataccgttgaggttcaagacgataccgtgatggttaacggtaaaaaggttgatgaaacgtatattcaaggagccattgatgcagctgaagcaaatggtggaacctataacgtgaaggatttcccgaatgaacagttccctgatggcaaagtgccggcaggtcatgtgtttgtaatgggagataaccgtccaaatagtacagacagtcgtatgatcggttatgtttcgttaaaagatattattggtcgtgcagatgtgattttctggccgatcggtgagattaagtggatcaaccactgaaattgaagtaaataatgaggtgaagacaagttgacgatacaatggtttccaggtcatatgactcgagccagacgccagattcaggataagttaaagctcatcgacgtggtcatcgaactattggatgcccgtctgcctgtctccagccgtaatccaatgattgacgaaatattgctggataaaccccggatgattttgttgaacaaatcggatttggcagatgcaaaagtgacgcaagaatggattgaatatttcaaaaaagaaggaattaccgcttttcctgtagatgcttcgacgggaaccaatgttaaagatattcccgtgcaggccaagcttcttcttaaagaaaaaattgaccgtcaaattgctaaagggattaatcctcgtgcggttcgcgggttgatcgttgggattcccaatgtaggtaaatcaacactgattaaccgactggctggacggagtattgcgttaacaggagatcgtcctggtgtgacgaaggggcaacagtggatcaaggtaggcaaagaaatggagttattggatactccaggtattctttggcctaagttcgaagatcaaaatgtaggttatcgtcttgccgtaactggtgcgatcaaagaggaaattttgaatgcagaggatatcgccttttttggaatcagttacctgatgcgttattactgggacgcccttgaagagagatacggacttcaggagttctccaaggatgcagatgattcagacagtgttattgcgattatggaacaagtcggtcgtatacgtggttgcattgtaagcggtggacgtattgatctggaaaaggcatcacgagcatttctgcgtgaactgcgagcgggtaaaatgggacgtttctctatggaagctccctattaaaaaatggactttacacgatgaagatcattatctttatctgttcatttcatatatacaagtgccgaaagaagcggccgttaccggattaccgggagcggtcgtttttttgtgtatacaaacgcggaagtagagctggaacatacgtcgaaaacgataaaatggaagaggattgaagaacagtacgctttatggaattggctgacctatatatcaggtgcatctaaatcgtgctatgataaatggtggtgcaatttaaattagacgaggtctgatatattcaatttaaaccatcaaataccgataaatgaagacatcactatctttatattgtaaatctcaaggaaaagttttactgagagagacaggttgtacagaacaaaagacagaggatctacgtctatattataaaaagttgtaagttatacgcatgctgaaaaagcgtgggtagaggagatgagcgttatggttgaaaataatgaagagatcgggttgaatctactggatactccgattggaccaaagaagaaaaaagaagtcagtgaacctcgagatctgttgctctatgagcaggagtattgggacagtggatttgaacgtattgctggtattgatgaggtgggacggggatgtttgtttggggatgttgtcgcagcggcggttattttaccgaaggatctcatcctggaaggcgtgaatgactccaagaaattaacggagaaaaaacgggatgcattatatgacatcattatggaaaaagcgctggcggtaggtatcgggtacgcggatgcagagacaattgatcggcttaacatcaagcaggctgcgagacttgcgatgaaaggtgcggttgaagcattggtagaaactcctgattatatgctggtggatgctgagaaggtggatgtgaatatacctcaactgtccattattaaaggtgatgctaatagtcaatcgatcgcagcggcatctattattgccaaggttacgcgagatcggctgtgtaaggaagaatgggatacgttatatccggaatatggtttgtcgatacataaaggatatgcaacaaaagttcatcgggagcaaattatggcattgggggcaaccccgatgcatcggcgcagttttctgggcaacctgcttggagagcagcaatctttgttttaacacaggtttgaagaaaggagggggagagatttgaatatcggttccatgataaaggggttaatgggagacagtaagcccggcaatgccaaaccgcttgaattaaaggaaggtcaggtggttcgtggctccgtcgttagtgtatccgatgatgggggagaagcagttctgcagattcaaggggtgcaagtgcgcgccaagttggagactccactccgtccgggtgagaccacgttgcttcaagtgcaacctccaggtgaaaatggcataacggtaatgaaacctatgacgggtacacttgctgagctgccacaagcttcgctgaacaacctgcttaaggatgtaggactgccggatacaaaagggaaccgggagctgttacttgccatgcagcgtagcggattgccgctaacgaaggataatgtggctatggtccagaatatgatgactgctaaacctgcacaggtccctgtggaagaatgggtgcaggcgacgggaattgcttttcagcgtggtcttccggttacggcggaaacagtaaaaggattacaccagacggtgtttggcccccctctgcaccagttgttaagcgggttggctgaccagttggaaacgatgctgactcaaacaacaggtaaaccactattgcttggagaacaatctgctacgttgaaaccagcagtcgtggctggtgcacctgttgtaccgaatgcttcacagacggaagaaggattggctgcatcaggcaatggtcgtcaggtgactggaaccggaacacctgctttgtcaacgcaacaaggacaagcggcattggcaggatctatatccatgacggatggcggggcagaggatgcaggtactgcggtgaaaggaaatgtgcagaccggcggaggcacaggaaatgctgaagccggggcaaaggcagttgccagcaacgttgaaacggctggcaaagggggtgcaggtattccgtctggaactggaatacctggagagagcccgcgcggggctgacgcggggcaggctgggagccgcccgggtacagcgggggcggcagcagaatctgtggctggccgtgtaattgtaggccagcctgaaacaggcgcggccgggcggactgacggccgcgctgaaacgcctgctgctgcggggacgccgtccgcagcaggccaggcggcgccagcagcgcctacggcagcgcagctggcgcccaagctgctggcgctgctggacgccttgcgcagcgcgtccactgccgcaccggcacagcctggtgcggcagcacaggccgcccctgcatcgcagggcggccaagcggctgcggctgccggaggcgtgccgcagccgttgccagccggcgctgatgcgccgccggctggcggtagtgccgcagcacctgcgggagctgcggcattgcacgcgcctgtcacccacgagggggacccgtgggtggggcgcgtgctgaagctgctcggtgcggagcacgagcagcaggccgttcacggcgcggcagtgcagccgcgcgtgggggatgcggcgagtccggcaaatgcggacacgctgaagggcttgctgctgcagcttgccagcagcgaaggtgcaccggcggcgcttaaggatgccgccggacaggccgtgcagtatctgacaggtcagcagttattgctgacaacagatcgcagtgctacatttgcacagatgcactggtttattccaatcactggaccggacggggaagaaacggcgtctgttcagattcaatcacgtcgtggatctcgtggagagctggatgcgtccaactgccgtctatggtttgatctggacatgaaaagtcttgggcctactctggtagatgtccatgtggttaataacattgtcagtctgcgtgtattaaatgatcgcgaaggaatgggaccgcttctggagagcggacgagaggtgatccatcaggcattggacaagctgggctatcaactgctgaccttcaaggcggaaccgtggcctgcgggccaggagccgggcgcggaacgaaaaacgcgggcctcggactatagtcctgaacgatacaaaggggtggacttgaaggtatgaaagacgagtcgtcacaaccggacctgctttccaaaaaggcggttgccctaaagtatgtccctggagagagtgaagcacctgttgttgtagccaaggggcgcggcaaagtggcagaagccattctggataaagccagagaaaacggcgtggctgttcaggaggatgcagcacttgtggaggtgctctctaagttggatctggatgaacagattccggcagaactgtatcaactggtcgcagaggtgctaacgtacgtctaccgtgcagatcgcatggcctcaggacgtgaggaaaatgagtcatggtagaacgtagattgggtcaggagccagaattaaagctcacacgacagcagaaaggccgattaggtgaagaggctgcctgtcaatggttgcgagagcacgattatcggatcattagacagaactggcgttgccgtagcggtgagattgacatcattgcttcctgcgagggcctgattgtctttgtggaagtaagaagcagaagtggagccgctcagtacggtacacctcaggaatcggttgatatgcgtaaaatgcagcaggtacgttcaaccgcatccgtatatttgcaaatgacgggagagacggaacttcagatccgttttgatgtaattgccgtaatgcttgatcatgcaggagagattgtctctgtgaatcatattgttaatgctttttaagcatgacactcaaagttattgctgtaatgagtgatacgaaatgtattattatttaatgtgagtcgatcagttatttcgaagtacaagtttaattatgtcttatcttgcattcgttttagttttgaaattagttaatatactaaagccgtagttcctatttatacaggagctacggctttttttgatttaactatgaaatcaaaaaacagaggatagagcattgataataaaatcatcgtatttcagaaattcatagatacaaaatgtatcatttgtaataaaataagaaagttgaaatttaaagagaggttggtgggatgtatgaaagagcttcagaatacttcgaacaacacagtaaaacaaatatgggagtgccctcggatggaagtgctggatatcagcgagaccatgaacggtggacaggggatttggcaatatgtttgggacggagaattctggaagcttgaacttatggtcagttaatttaagaggctaaagaggaatttttgatcaataaaaatggtgaggtgtagtgagaagatgcagacaagtatcaaatggataattcgactaagtacactatctttatgtttcattttgtttggaatcatgtattccggagtttcttatgcagccgatccgtctacacaggcaagtgtatcaggtaaagttattgatcgtcagggattacctgtcaaagacgctactgtaaagtattggcttaattatcgtggggatacgtcagagaaaagtgtgaagacggatgggaatggacggtatcgtattatagagtccgttgaagacaatacggacattacttttgtagttgaagcagagggttatgtgacgtacagacattatagctcctacggattgtccggtggagagcaaatacaacttgattttcgtatttatgagccatccacgattgtaggaacagtcaaagatcaggcaggcagaccggttccagatgctcgtataaaagtaacaagtgtctttgatcgtatagtgaaaactgatcagcaaggtcgatatgcggttacaggaattgattacgcctataatccgaacattgcaatatgggtagatgccgatgattatatgttatatgaacaggatcgcttgggtgtccgggagggaggaaccttgagaatggatgttgttttggcagaggcggcacacgtgcggggaaaagttgtagatgagtcgggcaatccagtaagtggggctaaagttaatgctggaggttcggcaacaacagatgctcaaggcaactatttaataaagcgcgtaccaacaggggctagaacgataacgggagaagcagcaggatatctaaaaacgagcttgagcgttactcttgtaaaaggagatcataatacgtttaatatcgtacttaagaaggatgcagatattacacctccagtaaccaagtacagattagttcctattacagatactgtgaacgggaaaatatacatcaaaggatttacattcagacttcaggcaacagatgaagtcaaaggttcgggcgtaaaaacaacgcaatatcgaatcaacgggggagaatggaaaaactatgaaggacccgtcaagttttatgcccctgatgtcaaggtggtagagtactatagtacagatgttgcaggtaaccaggagaagtacaacaaaatggattttattaatggcacatttgaagggaatggcacgtttgaaggggagagttacgacgattgattactcgttgatatgatatgtgaatcaataacatgagaataaaagacggttctgactttatgatccctcgtggtgaatcaagattcagagtcgtcttttctgttggaatgaccctaacggtactgacctttgcctcccctttgaatctcgtgatcagatgggtgtataatcaagaaggtaaactggtattttattatgtcataaagaaattatattgaatgtacaaggccgcgaatcactattgcggttgcaaatgattttataaacaggaggtacggccgatgagtaaagctacgaaaacaacaaatgaagtcagaaatgcgattcaaaaccgtcgtacggtgaaaaaattcaaaaaagaagctgttcctacacagcagattatagatttgctggatacggcagtctgggctcctaaccataaactgcgtgaaccttggagatttttgttgtttaccggaaatggacggaagaaactggcggaggctattgatgcagaaatgggagaagacaacaaattctcacccaatattatgcaagttccatccgttatgcttgttgtgctggaagaagatccaagacagaatatctgggacgaagacttcgctgcggttagtgcattggttcaaaactttatgcttgcagcctggagtgaagacattggaacgttctgggtgaccaagccatttttgtacgctcccaaattccgcaaatcgcttggaatagaggcgggagagaagattgtaggcatgatttatatgggttaccctgatgttattccttctgccaaagaacgcacaccagccaaggacaaactcactctttttgaataataaattattttagaccttagctatataagatccccttacgtttacaggggaaatccacgtacaagtacctttcttcacagaagagaagggcttgtacgtttttttgtcatgttggtgtatccgcattgtagaatctgcataaggaatccttctcgattttcctctgatgtctgcagtttcatgcccatttcactgcctttaggtaaatcggcctgttctttcctccatatgcttctaaaatagattaagatccaattgacgatactggatggcttcagccacatgagctgtcacaatttcaccttcatggtccagatcggcaattgtctgtgccatcttgattatccgatcatgtgcacgcatgctcaggtttaacgtttgcagcgtttgctctaacagctgctctgcctcttgggggagatggatcgttcgtcgcaaaagcgtgcccgaaagctggctattccaacgaaccgaacttttggcataacgtgtagcctgaatttgatgagcgtggatcacttttgcctgcatttcttcagaggaaggggaagcagcagacttgcgccactcgcctggtggaggaacttcaacctgaagatcaatgcggtccagcagtggtcctgaaattttggctcggtatgcggcaacacgggctggactacatatgcagcgttgctcctccgaatgagcggacaaataaccgcagggacagggattcatggaacatgcaagcatgaactgggccggaaaggtgaatgcagcccgtgcccgactaattgtcactgtgcgatcctctaacggctgccttaatacctccagcacttgacgctggaattcaggtaattcatccagaaacaatatgccacggtgggcaaggctcacttcacccggttttgggataccaccgcctccaatcagaccagaagtggatattgtatggtgaggcgagcgaaaaggtctatctgcaatcaggccttgaggcgcttctttcaatttgcctgcggcacttaatactttggtgacttccaacgcttcatcttctgacaaaggaggaaggatggagggcagacgtttgattaacatcgttttgcccgtgcctggcggtccaacgagcaatatgttatgcatgcctgctgctgcaatcataagcgcgcgttttacatgatgctgccccagaacatcgctatagtcatctgcaaataatggtgtttgtcttggcttcctatccgccatcttatgagtcttatcagttataggagcagcaaggtgtgcataatttttcaacacgactggtcctgcattcgatttgtttggtattcccactgaactagagggttgatctgggttttccggagcaatatcctgtaaatgacgaatgccaaaaacctggatacctcgaatcagtgacgcttcctccacgttatccaaaggcaggagcacggacgtaaagccttgccgtttggccagatccaccatggataaaatgccgggcacggacctgatcgaaccgtccaacgccagttcgccaaccacgagtgtccgttcctggggaggaagtacaagctgaccgcttgtcataagtaaaccaatagcaatggccagatcaaaggaagatccttccttgcgcagatcagcgggggccagattgattgtgatccgctgtaaagggtactgatatccgcaatttttaatcgctgcacgaacacgttcaacggcctcacgaatggctgaatccggtaaaccaatgatggacgtctgtggcagaccattggataaatcagtttccacttcgatcagaacgccatcaattccgtacaaacatgcactatgcaattttccgtacataacaaagaaacacctcactcgattcttgactccgcataatacgggccagtctacgaattaaggtgcttcctcagcttctactaagcattttatataaaaggaatcatggagtcaacctgtcattatcattgctgtagtcatctttcctgatccctgaattttatttctggaaggaaaacattaaatagctttggtgaaaatggttacgtataaaatttcattatgtttattaaattttgcccgagaaggcgtgaatctgttcgatggacttatctattattgttgttaaatcatggggatgaactgttgattatctaattatatttatattttacacaatctaatttatcataataaaattgaatagtaaaatcatttgtgctcaattattctgttttttttctattttgtgatagtatagatctatagttcccgtattattaggaatagattgcacaataggcaggtgagaaagacatatgcagactgacagtttgaagctggataaccaattatgctttgccatatatgcttgttcacgtgagattacgaagatgtaccagccttatctggaggtacttggcgtaacgtattcccagtatttggtgttgatggttttatgggaacgtgaagaatgtacggttaaggagatcggggaggctctctatctcgattcgggaacgttgacaccacttctcaaacgtttgcagtcagcaggacttattaatcgcgaacgctcggctcaggacgaacgaaaagtattaattacactaaccgactcgggtcgtgagttgcggaacaaggcattatccatacctgaatccattcagggagatgcgtgtttgaacagtacagagtttgaaacattgctgggtcagttcaaaggattgctggagaaagttcacgaaaccaacaccaacgcagccaaaaaataaaatgtagttttacatcaaggaaacctcagtttttagctgaggttttttccatatatacccaagcattcacaatatgggatcatactcatatcaaaatactgtctattaaccattagttttttaaggaaagcgttttaaaaacgtgttacaatgaattgggcttgagtgaaaatagtcaacatttgtcttttgttagtctaccaacccgccttgttgcagtcatgttgataggaggattcgagaatgaatatccatgaatatcaaggaaaagaagtactgaaacagtatggagttaccgttccaaacggaaaggttgcttatacagtcgatgaagcggtcgcggccgctgaggcattgggcagtccagtgactgttgtcaaagcacagattcacgcaggtggccggggtaaagccggcggcgtaaaagtggcaaagagtacggatgaagttcgtgcctatgcttctgaaattctgggcaaagtattggtaacacaccagactggaccagaaggtaaagaagtgaaacgtcttctgattgaagaaggatgcgatatccgcaaagagtattatgtgggtgttgttgtggaccgtgccacaggccgtgtagttatgatggcttccgaagaaggcggtactgagattgaagaagtagctgaagctacacctgagaaaattttcaaagaaatcattgaccctgccattggattgcaagtgttccaggcccgtaaactggcttacagcattaagattccgaatgaactggtgaacaaagctgttaagttcatgctcgcgctgtacactgcatttgtcgaaaaagattgctctattgccgagatcaatcctctcgttgttaccggagatggaaacgttatcgcgctagatgcgaaattaaactttgactccaacgccctgttccgtcacaaagacattttggaactgcgtgacctggatgaagaggatgaaaaagaaatcgaagcttccaaatacgacctcagctacatagcacttgatggcaacatcggctgtatggtcaatggtgcgggacttgccatggcaacgatggatattattaaatactacggtggagacccggccaacttccttgacgttgggggcggtgcaacaacagagaaggtgactgaagcatttaagatcatcttgtccgatgccaaagtagctgggatctttgttaacatcttcggtggcatcatgcgctgtgatgttatcgccaatggtgttgttgaagccgcaaagcagcttggcctgaccaaaccgctggttgttcgtcttgaaggaactaacgtggagcttggcaaacgtattctgggtgaatctggcctgaatatcgttcctgctgattccatggccgatggtgcacagaaaattgttgccctcgtaaaataagttcattccttagtaccggagctgtccgggaattgaaaaataaccgtaaggatgtgaaacaacgtgagtattttgatcgataaaaatacaaaagtcattacgcaaggcattacgggttcaacgggaatgttccacacgaagggcgcattggactacggaacccagatggtaggcggagttacaccgggtaaaggcggaactaatgtggatatcacgttggaagacggcacagtagctagtctgccggtgttcaacactgtgcaggaagcgaaggaagctacaggcgcaacagcgagcgtcatttacgttcctcctgcatttgcagcagattccattatggaagctgttgatgctgagctggacctcgtgatctgtattacagaaggtattccggttcttgacatgatcaaggttgaccgcttcatggaaggtaaagatactgtcctgatcggaccaaactgtccaggtgtcattacaccaggagaatgtaaaatcggtatcatgcctggttacatccatatggcagggcacgtaggagttgtttcccgtagtggaacacttacctatgaagccgttcatcaactgacgacacgtggtattggacaatcttcagctgtaggaatcgggggagacccggtaaaaggctcggagttcattgatatcctcaaacggttcaatgaagatccacagactcatgcggtcatcatgattggtgagattggtggtacagctgaagaggatgctgcagattgggtacgtgaaaacatgaccaaaccggttgttggctttatcggtggcgtaacagcgcctccaggcaaacggatgggccatgctggcgctattatctctggcggtaaaggtacagccaaagagaaaattgctaagctggaatcatgtggaatcaaagtagcaccaactcctgctgagatgggttcgactttggtgagtgtacttgaggaacgcggtattttgaatttgtgcacgacacattaattctttttcgttataatagaagaaacggctcggaaatgatttatttctggtagaccgactattatggttacggaaaaggtaagcaaccttttgtccttgaacagggcgaagggttgcttttttgcgttttttttacgggaaaagggggaggaattgtctctcatctgcgtaaacgcttgcattccgtggtcacttaacacacaatatgagggaagatctcttcccgctttgggaggtttatggtatggaagaaagatggatcttgtttgggttacatgagatggagggcattggcaagaaaacaatctcgaaactgattctgggacaacatgaattacccgaactattgaattatggggaaagcgactgggtcgcagcaggcttgcgcaaagatcaagctgcacgcttggctagccaatttactatcgactggatcgagagtaaaagagaacacgtttacaatcaggggatagaggttattacttatctggatcagaaatatcccatattaatgaaggaaaccgttcagcctccctgggtaatgtatgctcgaggggatgttagtttgcttcacaattcgtctattgccatggtgggaactcgtatgccaaccgtgtatgggcgcaaagttggagaaaagctggcagagcaattatgcaatgcaggactgacgattgtaagcgggcttgcccgcggtattgatagcgtatgtcatgaggcagtactacgtgcaaaaggaaaaacgattgcagtattcggaacagggattgataatatatacccacccgaaaatacaagtctcgctgagcgaatcgcggagacggggctgcttttatcggaatatccaccaggtacgcgagcgcgccagggattatttccggaacggaatcgaatcattgccggtctgacactgggaacattggttgttgaggctgacattcgcagtggttcactcattacagcagatgctgcgcttgaagcaggcagggatgtatttgcagtccctggacctattacatcgccgaaaagtcggggagcacacaatcttatccgtcaaggggccaaattggtcacttgtgcagcagatgtgttggaagagtatcgattgggcttgccaaatgcagaacaacttccttacaatagaggacgttcgaccgaaacaaccgagccttccgggcgagggatattcgctgaggttaagctctctccagatgaacaacgtgtgatttatctgttggaacagggagaacaatcattggatcaactggttgagctgcttggttgggattttggacatttgcattcagttctgttatctttaatcataaaaaagcagattagccaattaccaggcactaaatacgcgagggtatgacgaagctacaacttacgtagtgcgtggaaatatataattagcagaagttattaactatgcataagcttacagaaacagtttcatgacagtttcatgactgagaggaggatgaacctatggcggatgcactcgtaatcgtggagtcgccctcaaaggcgaagacgataggcaaatatttaggcagcaagttcatcgtaaaagcttcgatggggcatattcgcgatttgccaaagagtcagatcggcgttgaggtagagaatgattttaatccgaagtatattacgatccgcggcaaaggttcaattttgaaagaactgaaggatgcacggaagaaagtgaaaaaagtgtatctcgcagctgacccggatcgcgaaggtgaggctatcgcatggcatttggcccatgcccttgaactggacgatacggcagattgccgggtagtatttaatgaaattacaaaacaggcggtcaaagatgcgttcaaaacgccgcggaaaatcaatatggatttggttaacgcgcagcaggcaagacgtattctggatcggctcgttggatataaaattagtccgttattatggaagaaagtgaaaaaaggtttgtctgcaggccgggttcagtccgtggctgttaaaatcattttagatcgtgaaaatgaaattgatgattttgagccggaagaatactggagcattaccgccaagctgacagcagacggcaatccgtttgaagccaagtttcataaactgaacggggccaaaacagagctgggcagtgaagaggaagtgcaagcgatcctgaaacagatcgaaggtgcagactttacgatcaaggaagttaaagagaaagaacgtagccgtaacccctccgccccgtttacgacaagttctctgcaacaggaagcggcgcgtaaattgaatttcagagcttccaagacgatgtcggtcgcccaacaactatatgaaggtgtagaccttggaaaagaaggcacagtaggtctcatcacgtatatgcgtacggactccacacgaattgcggcatctgcacaagaagaagccaaagaatatatcgttggtaagtatggtgagccatttgcacctgagactccacgaaactattccaaaaaagcagctaatgctcaggatgcgcatgaagcgattcgtccaacttcaattctgcgtgaccctgactcaatcaagtcattcatgagtcgcgatcagttccggttgtacaaactggtatgggaacgttttgttgcgagccagatgtcttcggctatcctggatacactctctgtagatattgctgcgggggacaccattttccgtgcagcaggttcgaaggtacgattccaaggtttcatgaaggtatatgttgaaggaaacgacgatggtacaaccgatgaagatcgtctgttgcccccgttgaaaagtggagatgtgcttgagaagcaggagattgagccaaaacagcattttacacaaccgccaccccgatatacggaggcaaggttggttaagacgcttgaggaattgggtatagggcgtccgagtacatatgcgccaacactggagaccattcagaagcgcggatatgttgcgatagaggaaaagaaattcatgcccacggagcttggtgaactggtcatcgaacagatggaagagtttttcccggaaattctgaatgtagagttcaccgcaaacatggaaggtgatcttgaccatgtggaggaaggttccgaggattgggtcaaagtactcgcagaattctatgaatcttttgagaaacgccttgagtttgcggaagaagaaatgaaagaaatcgagattgaagacgaagtatcggatgagatctgtgagaagtgcggcaaaccgctggtttataaactcggacgttttggcaagtttcttgcgtgctcaggcttccctgattgccggaataccaaaccgattatcaaggatatcggcgtgacttgtccgaagtgtaaggaaggtcatgttgttgagcgtcgtagcaaaaaaggacgtattttctacggttgtgacaaatatcctgaatgtgattttgtctcatgggacagaccttcagccaaaccatgtccaagttgcggatcgctaatgattgaaaagcggaacaaaaagggagcacgattgcagtgtacttcatgtgatcatcaggagccggtggatgaaccggatgacgaatcagcggattaatatatatgcgaatcaaatttagtgaattttgaaattgttttatgggggtaaatgattttgacgaatgaacaacaagtaaccgttattggtgccgggctggcaggaacagaagcggcctggcagattgcaagtcgcggcgtacgcgtaaaattatacgagatgagacctgttgtgaaaacgccagcccatcatacggataaatttgcagaactggtatgtagcaactcgctgcgtgcgaatggattgaccaatgcagtgggtgtgttaaaagaagaaatgagaatgctcaattctctcgtattgtcagcagcagacaaacatgcagttcccgcaggtggggcgcttgctgtggaccgggatggattttcaggtgagattacatccacgttgcaccagcatccgctcatcgaagtggtgaatgaggaattaacttttctgccggaagatggcatcgttgttgttgcaacggggccgttgacttcacctgcattgtctgagcaaatcaaggcactaatgggtgaagagtatttctacttctatgatgcagctgcaccgatcatcgaaaaagattcaattgatatgaataaagtgtatctggcttcccgttatgataaaggtgaagcggcatatctgaactgtccgatgacagaagaagagtttgatgtcttctatgaagctctcattactgctgaggtcgctcaattaaaagagtttgagaaagaaatctactttgaaggctgtatgccaatcgaagtgatgatgaaacgaggaaaacagacggctctgtttggtccaatgaaaccggtaggtctggttaaccctcatacaggagagttgccacatgcggttgttcagcttagacaggacaatgcagctggaaccctgtataacttggtgggcttccagacgcatctgaaatggggagaacagaaacgtgtcttctcccttattcctggacttgaaaatgcagagttcgttcgttatggcgtaatgcaccgtaatacatttattaactctcctaaactgcttcttccgacgtatcagtttaaagagcgtccaaacctgttctttgcaggtcagatgacgggtgtagaaggatatgtggaatctgctgcatcagggctgattgccggcatgaacgcagccaaagcagcacttgggcaggaactggtagtattgccggtagaaacaacacttggcagtatggctcagtatattacaacggctgacttcaagcacttccaaccaatgaacgcaaactttggtttgttgccgaagcttgaaacaaagattcgtaacaaaaaggaaaaaaatgaagctcttgcacagcgtgcactggatggcatcattagttttgctgcggcagaaggtctaactgttccggaacgcgtataaattattcgtgggaggatgctgatatcatggatatgtcatttcatgctacaacgatctgtgctgttcgtcataatggtaaggctgcaatcgcaggagatggtcaggtgaccatgggccaaagtgttgtgatgaagaatacagccaagaaggtaagacgtttgtaccgcggacaggttgttgctggctttgctggttctgtggcggatgcgatcaccctgtttgagaaattcgaaggtaagctcgaggagcaccatggtaacttgcaacgtgctgctgtagagcttgccaaggattggcgtcaggatcggatcttgcgtaagcttgaggcactcttgattgtgatggacaaatcaggtatgctgctcatttcaggcggcggggagataattgaaccggatgatgacgttattgctatcggatcaggtggaaactttgccttatctgctgcgcgtgcgttgaaacgtcatgcagtaaatctggaagcgaaagatattgcgcgtgaatcacttcagattgcctcggagctatgtgtatataccaataataatattattgtagaagagttataagccaaagaaatctcccgtagtggagcatgattctgtaatctgctccaggacgtctaggggattctttgtccttgttaggaaaaataaattcaacatactggtaggagggaagcaatatgaatactcaagcgttaacaccgagacagattgttgcagagcttgacaagtatattgtaggtcaaaagaaagctaaaaaatcggtagcggtagcccttcgtaatcgttatcggcgtagccttttgcctgagcacactcaggacgacattgtgcctaaaaatatcttgatgattggacctaccggtgtgggtaaaacggaaatcgcccgtcgcctcgctaaactggtaggtgcgccatttgtgaaagtggaagctaccaagttcactgaagtaggttacgttggccgtgacgttgaatcgatggtgcgtgatctgattgagacatcactgcgtatggtgaagctggagcggactgaaaaagtgaaggacaaagctgaagaagctgccaatgagcgaattgtacatattttggctccttcacagtctaagtccaagagtcagcgtaatccctttgagatgatctttggtaataatggcaacaacgttcaggaacaggatgagccagaaccggatactggggttgccgaacgccgccgtaagatcaagtttgatctgttgtccggtaagttggaggatgacatcattgagattgatgtcgaagacactgcgcctaacatgatggacatgtttgctggacaaggtaatgatcagatgggcatgaatatgcaggagatgtttggcagcctcttacctcgtcgtacgaaaaagcgcaagctcgctatcaaagaagctcgcaaagtgttgatccaggaagaagcaggcaaattgatcgatatggatgatgttacccaagagtccattcgccgggcggagcagacaggtatcattttcatagatgaaatcgacaaggttgccagtcaaggacgcggtagtggacccgatgtatcccgtgagggtgtgcaacgtgacattctgcctatcgtagagggctctacagtgatgacgaaatatggccctgtcaaaacggattatattctgtttatggcagctggcgcattccatgtcgccaaaccctctgatttgattcctgagcttcagggacgcttcccaatccgtgtggaactaagcagtctaacactggaagagtttgtatccattctgactgaaccccaaaatgcactgaccaagcagtatgttgatctgttgcgcacagagaatattgagattgagttctcggatgaggctattcgcgagattgccaaattggctgaatccgtcaatcaaaatacagaaaatataggtgcacgtcgattgcatacgattcttgagaagcttttggaggatttatcctttgaggcacctgagcttacactggaacgtatggtgattactccggagtatgtccgggagaaattaaatgatattgcgcttgatcgtgatttgagtcagtatatcctgtaacatgcggctgcggctagtaatgtagttgttaaaatgatgttataaatgaacggtatgcaagagagtagagaacatttgtgtgatcgacaaagggacgcgatcctttaacgaatcacaaaggccctcttacttaacgcatatcgtttatttttgtttctatctaaaggattttgatgttacaaccgataaaagatgtgtggttgttatacggatcgacaaaacctaggacttgtgccgcatgtatacggagttaaaacctatcggagtggtagttattcttccattccatacccaatgattcccattaaaagaattttccttattccaagtctggtcatcggtttagtcgacagattggtaaatgttgcgtaaatgcgcaaaatgatgaattgttgaaaagtttgaagccactaattgttttcttaaaattaaaatatatagaccccactgaattgttaagaaagtgttgtgtgggcaagacgagttttctttattcttgaaagataatttgtcaattgattaatatacagctttgtatgtatacctatcatattgtccttaaacccttagtataacagcaaaaaattctaacattatcaactatgaaatattcggaaatatacataattacgggcgttataaccttatgttgagactcgaaattttttttttattttaagaatgtttaagaacaataagggagagtattaacatacttttgttttgggccccaacatttacgaaaaaattcataatttgcagaaaatacacaaaaagccccgtctttcagaaaagatagggcttttttcttattgtaataaatcccaaactcgaagaaacttatgttatacgacaacatcagagttaattctacttaagtcctagaaaaccgtgtaaagacgaatgtttttgtcgaaaaaaacataagaattttcaagggaaaagatacaatctttttccataacttctaaagagaggagggggattgtgaatcttttaaacgatatcagctttaaaagattgcaaggtgcactcgatgcgtccaatatcagacaacgaacaattgctgacaacatcgcgaacgccgataccccgtatttcaagcgctcggacgtttcttttgaagaaatgttgcaagggcaaatgaatggagatatgcctgttcttaagggtaaagtaactgatgcaaggcattttgtcataggtccttcctcttccgtacccacgccagtagttaatatggaccagtcaacctccatgaataacaacgaaaataatgtcgatatagacagagaaatgagtcttctggcggagaatcagttacgttataacgcttatattcagcaagtgaatgaacaaattaaaatcatgcgtgttggcgtggaagggagataacctaaattgaacattagtaatagttttagtatcagtagctcagctctgacagcccaacggttgcggatggacgttatatcttccaacattgccaacgcagagactacgcgcgcgagcgtatccaatggtgaagcggtcccttacaaacgtaaaatggttgtgcttgagccgaataaaacgtcatttggtacgatgctgcaaaatcagatgagaggtagcggttcaggagatggcgtaagagtaacggagattcgcgaggatcagtcacctctgaaacctgtgtatgacccttctcatccggatgcaaacgcagaaggatatgtatttatgcctaatgtggatattgcgaaagaaatggtcgacatgatctctgcttcgcgttcctatgaagcaaacgtaacagcactgaattcaaccaaagcgatgatctccaaagctttggagattggaagataatctgcttaaaaatgaaaataagaaaaatacaaaccaggatgaaggggagggacattaatgattcagaacaacatgtttagcacacaggggatacaaccgctacagatgaagagtgcaaccgaaagtaagccttctacaccagccgaaaccattcagagcttcggtacatacttacagaatgcattagggtccgttgcagcacaggaggctcaatcgcatgaaatgtcgaatcaatttttggtcggcaaagcgaatgtggatcaggtgatgattgcttcagaacaggccttgttaagcctacaactcacaactcaagtccgaaacaaagtggtcgaagcataccaagaagttatgcgaacgcagttataaaataacctacttgcgcttcgataatagcgctgatcattacaacaaagcagctgcgatgctgctcctgatcgtcaacctatgaaacggctagggttgagtaaggacagactaagcaaagtttcggatggggtgacagagtgaatgagagaatcgcccagtacagggataaggcatcccagtattggaatagttttagcaaaaagcaaaaagtattatttatatctaccttcctgtttctgattttggctgcagttgtactcacgatgcaattgtccaaaacggaatatgaagttgcttttacagatttgaatgcaagtgattcagcgggcgtgatcagttatctcgattcatctagcattccatacaaattaagttcagatggcaagaccatatccgtaccgagtactagtgttgcaattgcaaaggtaaacgttggatctcaagggattattcagaatggttcattagggtataagtcattcgaggagtcatcatcccccatcgggatgacggataaagagtttgatgtaaagtacaacaacgctataaacggagaagttgaacagttacttcagcggatgcaagggatacaggatgctaaagtactggttaatatgccgaaagataacatctttgctggtttggaagaacaagacaaagcatcagcatcggtagctctccaattcaaaccgggttatcacccaaatcaggcagcggtagatggctactttaacttggttaagactgcaattcctaatctgcctgttgagaacatcacaattacgaacacagatgaagcagaattgattccaactgctcgaggtggcagtggcgggttgtcttccgaagttcaagagaacatggcactacagaaaaagtttgaaaacgatgtccgtaataacgtaaaacaattcctttcccagattgtaggcgaagacaaagttaatgttttggtagcctccaagcttaattttgacaaagaaacacgtaaggaaaatctggtcacacctgttgatgtagataatatgaaaggcatcgagatcagtgtgcaggagattcaaaagagctacactggcgcaagcaatccaacaggtggtgttgctggcacaggacaagaggaagttccgggttacccatcatctgatgcaaccggtaactctacctccgaagaatcatcaagcactataaactacgatgttaatcgaattgccaaggatattatttccagtccgtatactgtaaaagacttaaccattaacgttgcggttgaaccaccgaatggagaaacagaattacagggaccggttcaggacgcaattgagaacattttggttaacattgttcgtgcttcactggcagactcaggcactataataagtgacgccgatctgacaaagaaagtttcagtcatgtcacaaggcttccagactgcctctgcagacaatacaggtttccagctttcctcaacgatgatgtggggtggaggcgcactcatagcggcattgatcgcagcggtagttattttgttagtacgccgtcgccgcaaacaaaacgaagtcgaagaagaagagattcctcttccaatagcaacagagttcccgtccattacgctggacagtgtaacgaacgaaagtcaggtgcgcaaacaattggagagtttggccaagaaaaagccagacgaattcgtcaatctgctgcgtacatggctggctgacgaatagaggtgagcgcattggcaaaggcaagcagtcaaggtttgactggcagacaaaaagcagcaatattgttgattacattaggtccggaagtatcggctcagatcttcaaacatctgcgtgatgaggagattgagcaacttacgttggagattgccaacgttcgcaaagttgattcttctgaaaaggatatgatcatggccgagtttcaccagatctgtctggcgcaggaatatatctctcagggcggtatcaattacgccagagaaatcctggagaaagctctaggttcatcaaaagcacttgaagtcattaatcgtttgacagctacgctgcaagtcagaccatttgactttgcgcgcaaagcagatccgaaccaaattttgaactttattcagaatgaaagcccgcaaacgattgccctggttctgtcttacctgcaattcgaacaggcagcagcgattctatcatccttgccacaagagaaacaggcagatgtcgctcgccgagtggctgttatggatagtacttcgccagaagttatctctcaagtggagcgggttctggaacagaaactatcttctaccgtaacgcaggattacacgaatgcgggtggtatcgaatcgatcgttcagattctgaacggagtcgatcgggggacagagcgtaccattttggactcgctcgagattcaggatccagagcttgcagaggaaatcaaaaaacgcatgtttgtattcgaagatatcgtcaatgtggatgatcgttcgattcagcgcattattcgggatatcgacaacgcagatttgcagctggcactcaaagtggcaagcgaagaagttcgggatgccgtgttccggaatatgtcgaaacggatgtccgagacattcaaagaagagatggaatttatgggacctgtgcgattgcgtgatgttgaggaagctcagacacgtatcgtaggaacgatacgcagattggaagaagccggtgagatcattatcgcacgcggtggaggagatgatatcattgtctaatttgattaaatctttccagtatgtacccgttgatgaccgtaaaaaacttgaaaatcatcatcattatggtggtgctgaggagtctgaaacggaattatacggtgatagtgctgaaggttctgaagtagaaacgcttcaagcacgcgtggacgaagaaacacaacgtctcaccgcagagatgctggaagatgccaaggagtttgcagaaaagcaagtacgtgaagcttcggaagaagcagagcgcatgcttcaagaggcccgtgaacagatcgacagctggtggcaggaacaacgacaacaggatgaacatctgactgaagcgcttcgttcacaaggtttccaacagggttttgaagaaggcaaagtacaagctgaactggatctccaggtgcagatcgaaaagatgatgattgaagcccagggagtgctcaaggaagcttatgtagctaaagatcagatcattcaggaagccgaaccgttcctcgtggagctcgcttgcgggatcgctgagaaagtcattgataagcaacttaccattgaacccgatcatacattggaactgattcgtcagagtttgtcacgtaaacgggaacagggtttgatcacactctgtgtggcacctgatcagtttacatttgtacaggcagctcgtgaagaattgtctctgtctattgactctcaggcagaattgcagattttgcctgattcaacggtcaaagataagggatgtgtcattcgttcttcgtttggaagtgtagatgcgagaattgatacacagcttgctgagattaaaaaagaactggtccgcatagcacttgaggatgaggagcgaaaaaatcaacatgaaggttcttagttcacagcgatatatggaacatttgcgccaattcgatcctgttcgtattaacggaaaagttactcaggtcattggtcttatggtggagtcagaagggccagatgcaagtatcggtgacgtatgttatatctatcctggtaaatcggctaagcctcttcaggccgaagttgttgggtttcgagataacaaagtgctgcttatgccactgggtgaacttcaatccatcggtcctggttgtgatgtagtcggtacgggtaaaccactcggcgttcaggtaggctccgaattgctcggtaaagtgctggacggacttgggcagccgttagacggttccctactcccatccagaatgccgatgtattctacctccaatactccggttaatccaatggatcgtccgcgtgtacttgaaacgatgggtgttggtgtaagagctatcgacggattgttgaccgtaggtaagggacagcgcgtaggtatttttgccggttctggtgttggtaagagtacattgatgggcatgattgctcgtaatacagcagcagatgtcaatgtcatcgcgcttgtgggtgagcgtggacgtgaggtgcgcgactttattgaacgggatctgggtccagaaggactggaacgctccgtagtcattgttgcaacttcagatcagcctgccctgattcggattaagggagcagttattgcgaccactattgcagagtatttccgagatcgtggaatgaacgtgatgctcatgatggattcggtaacccgatatgcgatggcacaaagggaagtgggtctggccgtaggtgaacctccggcaatgagaggatatacgccatcggtttttgcgagtttgcccaaactgcttgaacgggcgggtacagggcctaccggttcgattacagccttttacaccgttctggtcgatggggatgacatgaatgaaccaatcgcggatgccgtaaggggtattctggatggacacattgtgttaaatcgatccattgcaaataaaggtcattttccagcgattgatgtgttagccagcataagccgtgttatgaaggatattgctccagaagagcagttggaagccgttaataatatgaaacgtttgatggctgtgtacaaagaatcggaagatttgatcaatattggagcttaccagcggggatcaaatgcagccatagatgaatcgatagaccagattgatagtatatggaactttaccaagcagaaagtcgacgagaaagtcactttaagtgaagtacaggaacgtttgattcttgaatttgcaaggagatgaatgggtaaacgatgaaatttcgatatcatttccagaaagttgttgacctcaagagtaatgaaaaaacacaggcagagtggatgttatccacagcgatcggtaaacttcagacggaggaagaacatctgatacaacttctgaacgacagaagtaatctgatcggcattatccaatctgctacggaaaatacagcgtctgtaaacagtctgcaggagatgcagcgttatgtacatcaccttgacgagtgcatttcacgcaaaaacagtgatgttaaacatgctcaggtcaacgtgcaacggaatcagacgtttctgaacggtaagatggttgatgaaaaagtatggcttggagcgagagacaaggccaaaatcaaatttcagcaggagatgctcctccgggaacagaacgatctggacgagatggctactgtacgcttcgctgccaaagccggacgcgcgaattgatgtgagccggacgcgaagttgtctcgtgaaggaggaatgaacgatggctgttaaagatgatagcgacatggaaaaagagtcgggaggcggttgggaaaagtttctcatgatttctatcccgattgtattcaccgtggtattactaggtgtactacttacgctatttaatgtagatattcgtaataatttgttcgaattcgccaacaagataccggtagttaaggaatgggtaccggatcctgtactggatccggagaaggagaagctggagaagagtgagcagcaggttgaaagtgctgaagccacaattgaaaagctgaaatcccaagtaactgccaaagaaacagaacttaaggcagcacaggaagcgacaacaactgaagcgaagaaagcaacagaccttcagaagaagttggatgatgcggagaaagctgctgaaacggctacggcagcaacgccggagacagaatctgattatcaaaaacaaatcaaagatttggctaaaatgtatgcggacatgagcccaagcaaagctgcaccgattttgcaaaatatgacgaatgaggaaatggtattgttgttgaatgccatgcagtcatctgctcggaccaaggtgcttgaaaagatggacccgaaaacagcagccgatgtcaccatgatgatgaaggatgctaaaccgtccggagatctggcactggatgcgctgcaatccagattgaagaaagaaaccgcagcaacttcaactgcatccacaaccacaagcaaaaacctggataaaaaccagcttagtcaaacatttgcttcgatgtctgcttcaagtggtgccaagttattattggaaacatacaagttaagtcctgacaaaacattgaccatcctgaattcagtagatgatgcaacacgctctcaattgcttgagaacatgtcttcagaggactcggttgaaactgcaaaaattttgaacagattaatgggtaacaagtagagctgattacaatgtataaccgagaggaggtgaaaataaatgtcgattgtatatcaaatggcatccacagcaaaagcaacaggagcaggtcagacaaccggagcacaatcgaaaggttcagttgcaggtgctagcggtgaatttctccaaactcttgcacaatcgctatctggaggaaatacagaaggtgatagttcaagcgctactggaagcttaactgccaatccgttggtgttttcctttgctacaagtgaagaaggagaagcggcatcaatcacggctatactgaattcgttgttcacggacttggattcacttgacgaagctttggaaaatgacccagctctacttgcaggtttgcaaactctgattcaacagctgtatacacaattaagtaatccttcaggtactaacacagaaggttccgacgagtcttcgaacggagcggaaagcgtaaaaacagtacccgcaattgaactgtcgcagcatccggcagcagtacgttttgttctgcaagatatgcttacacaattagtagctggaatgaatgatcctgagagtaacgttgcgaagaacgctcctgaattcaaacatttgttacaatctctgcagagtcagcttcaagaggctggagtggataccactagtaacaaaggatggactgaactgaaatccatactggatacattgactgcagttaaggatcagactgcacaggtcgctccaagtactacgcttcaaacatccaaacaggattcggtcataccacaagttcttgttgcagcagtggcgaattctggaacccaggtaaaagatgaggctgttaccacatctgcttcaaatgcaggtggagaagtggaacactcaaccatcattactgcaggagagctgtccttgcgttcatcaggtacaacagcaggaaaaccggctgaacctgtaatgcaaacatcacagtttgccaaggaaatgacacagtttgttgttaacaagctggatattgtccagcaaaaaggattttccgaggcgaccatctcacttcggcctgagcatctaggtaaattggatgttcaaattaccttgcagaacgggcagttggttgcacggtttatgactgaacatacgatggctaaagacatgcttgaacaacaaatgacgcagctgcgttcttcacttcaagcccagggaattcaagtggaacgacttgaggttacccagaacagttcaatcggatcacagatgtatcaggacggaggccgtcagccgggaagtaactctcaacaacaacgccgttcgcgtgagcgtgaggaacaatcggatgatgctatagctacagcagggattcaagaagaattgcgtaactggcgtagcgagcaagtcgaaggaaatgaattacagagagatacgtttagtgctaaggcttaaatagaaatgaggtgagcatatggctaatgaaattgtttcaacgaataatacctggccgaactattcggcagccaataaagcaaccacaagtgctgcaacaaaagaattgggcaaagatcagtttctaaaaatcctgattacccagctgcaaaatcaagacccgatgcagccgatggaggataaggaatttatcgctcaaatggcacaattcagctcagtggagcaactggtcaatatttctacgcagcttaaaacattgaaccagtcacttggtgctgtatccggcatgattggcatggaggtaagttggctttcttctaataaagatgataacggaactcttcgtcagggtattgtagattccatcattgtaagagatagcgttcaatacgcaaaagtaggcaacgacgagattaagctggatgagatcattcaggtgaattatccaaaacagacagaagagagtcaaactccggtacagaacgttcaggatgtaacccctgaaacgaacgagagccaggaagttgaatcatccgctgaaacgggtgatacggaagatagcgggaaaacgatatgagtgatcgcataacggttggacaattatacgcaggcccgattacaccgaatatgcttcaaagacccaaaacgggagaagcttcggctatacccgaaaaaccttttgcaaaagtactggaagataatcttctgaaattgagcaatcatgctgccaaacgattggagcagcgcggtattgaactcaagactgagcaaatggaacagattggttctgctttggacaaagctgctgccaaaggagccaaagagtcattgattttaatgcaggatatggcttttatcgtcaatgtcaaaaatcgtactgtggttacagctatggatagtgagagcatgaaggataatgtgttcactcaaattgatagtgccgtaatcatttcttgaccggctggcccttctcgggagccggaatgccgctgaccgactgatgcggtaaccaaatgaagactgggaggatttttaaaaatgataaaatcaatgtactcaggcgtttccgggatgcggggtttccaaacaaaactcgacgtaattggtaacaatattgcgaacgtaaacacggttggctttaaaggcagtcgggttatgttcaaagatattatgagccaaacaacggcaggggtaactgctcctggcgatgcaagtggtggtgtcaatgcgaaacaaatcggtcttggtgtaacggtaggttcaattgatacgctgcatctggcaggtagcccaatgacaacgaataatccaacagatcttcggattaatggagatggattcttcttggtacgtttgagtgaagatcaggaaataccttacctgactcgtgcaggggatttccatgtggatgctgcacgtaaccttttgacttcggatggattgtttgttctggataacggtggtggaaatataacgataccggatgatgttgtttccttcacgataggtcaggatggaacaattaaccaaaccatggcagacggaaccatcgaagcgggtccacagcttggaataggtaaagttgtcaatccagaaggccttgagaaaattgggggcaacttgtaccgtatgacagcaaacgcgaatccggatggggcgctggaaccattaacagcgaacagtgctgaggacggaacaggagcaatcattgctggacagctcgagatgtctaacgtggatctgacaggagagtttactgagatgattgtagctcaacgtggattccaggcaaactcccggatcattacaacgtcggatgaaatacttcaggaagttgttaacctgaaacgttaataactgattaatgaatttttaaaacgtggaggagcttgctcctcccactctgattaagggggcttagcatgatttcggttacgcggttaaatggttctcccatgtggttaaatgcgctgatggttgaaattgtggaagagacgccggatacgtatattactctggtaactggaaagagactgattgtgcttgaaaaagccgctgacgttatttccaagattaaagattacaaccgtgaaatcggggttcaggcagccactattaaagtgcagcaaacggaggaatcctgatgaaaaaaatgatgccctggcttgcaacgatgttgctggcaataacactcattgtggtggttgtgtttgtatttatgcaaggacagaacgggaataaggacgacacacatacggcggcggcttcagaagccaagaagatgactgcggatgagattgtagaggtttcctctgagcttggagaaattaaaaccaatttggctgatacggatcatgttgtagttgtcagcttttcattcaagttgtcagacaaaacagccaaagaagatttcgagaaaatcaaagaaattacagtgaagcctattatcattcagacgtttgcggatacaaagtctgaggagctggctacagcgaagggccgcgtacaatttaatgagagattgacggggctaattaatgaagctttacctgaaggtaagttgagcagtaccagtttttcagcttttgtaatggcgccaatgtaaatgaacagaacacgctgtagacctgtaagggggtgagaacatggtggatgtattatcacaaaatgagattgacgccctattagcagccctttcttctggtgaaatggacgcagaagaattgaagaaggaagaaactcagaagaaaattagatcgtacgattttaagcgggcagtgcgtttttccaaagaccatatcagaagcttgactcgtattcacgaaaactttgcacgctttctcaccacttatttttcagcccaactgcggacgttcgttcaaatcaatgtcgttcaggtcgaacagttgccttatgatgagtttatccgttctattcctaagatgacgatattgaacatttttgaagcggagccactacagggacgaatggtgatggaagtccatccaaacgtgggatatgcgatgttggatcgcctgcttggtggaaccggaattgctccaaccaagatcgcatccatgacggagattgagacgaccatcatggagcggatattcagccgagcatttgaaagtttgcaggaagcatggaagactgtgttggatatttccccaaggatggaagcgctcgagaccaatccgcaatttatgcagattgtatctcccaatgagaccattgctctgatctcgctcagtaccaaaattggtgacacgacaggcatgatcaatctatgtataccgcatgtcgttcttgaacctattatgtcacggttgtcaactcatcagtggtttgtttcggagaagaaaacgagagctccggaggagtatgatgctctaaaagagcgtgtaaacaaagccaagttaccaatcgttgcggaattgggagaatcgagaatttcaattgcagaatttctgggtctgtccgttggcgatgtcattacgttgaacaaaccagttgatgagggactttccataaaagtgggtgacaaactgaaatacatgggcagtccggggacaatcaaagaccgtgtggctgtgcaaatagacaagattgtcaccgaaggagttgaagaatttgacgagtaaggattatttatcccaagaagaaatcgatgctttgctcaggcaatcggaatcgataaacagctcggaacccgctgaaaagacggttgatgattttttgaccgagctggagcaggatgccttgggggagattggtaacattacatttggtagcgcggcaacagccttatccacgctattaggcctcaaagtagatattacaacacctaaagtttctatcattagtcgaacgcagtttgaagaagcttttcctaagccacatgttgccgttcatgtgaattacgtggatggattcgaaggcattaactcacttgttatcaagaagagagatgcccaagtcatcgctgatttgatgttgggtggagaaggaaatccggtcgatgaagaactgaatgaaatccatattagtgcagtacaggaagcgatgaaccagatgatgggttcctctgcaacctcaatgtccacgatttttaatcgttttgtgaatatttcccctccgggaatcgatattctcaatctggagagtggagagggtgtaagtaatcttccagcagatgagacacttatccaagtttcatttcgtttgttaatcggggatctgatcgattccaatctgatgcagttgcttccagtacattttgccaaaagcatggtagatatgctgattggaggcgctcaggagtcaactgccagcgcaccagtggcatcaacacctgaacctgcgccagcagctgtaccagcaacgccaccaccggttgcggagcagccgcccgttcagcaccaacaggctccacaggctccacaggctccacaacagcctgctcaggactataacggatatggacaggccccgatgggtatgcctcaaggaatgccgccacagcagccgtatggcatgccaccgcagcaaccttatggtgcacctcaacattacggtggaatgccaaataggaatgttaacgtacaaccagttcaattcgccaatttgcaaaatggggcgtatggtcaggtagacgaaaacaatttgaatttattgatggacattccccttaaggtcaccgtagaattaggaaggacccagaagcaaattaaagatattttggaactgtcacagggttcgattgtcgaactggataagttagccggggaacctgtcgatattttggtgaataacaaactgatcgccaagggagaagttgtcgttattgacgaaaactttggtgttcgtgttatagatatcgttagccaatgggaccgaattcagaaattacaataagcacaatttagggaggacttgaatcaagatggcaaaccgaattttagtcgtagacgacgctgcatttatgagaatgatgatccgggacattttgtccaaaaatggatatgaggttgttggtgaggcacaggatggctcacaagcaattgagaaatttaaagagcttcgtccggatctgatcacaatggatattacgatgcctgagatggacggcattgcagctttgaaagaaatcaagaagattgatgctaacgctaaagtaattatgtgctccgcgatgggtcaacaagcgatggtaatcgacgctattcaagcaggtgctaaagactttatcgttaaaccgttccaatctgaccgggttatcgaagcgatcagcaagacactgggcgtttaagagacatgatgatggctcagggtgatattccaggaggagctggcgtgggaagtaattattatttacagcttgtatgggtgattgttgtcctggccgtcatcctggcccttattgtttatctgatccgttttctaaacaaaaggaatcagcaaatgttccggcacggcacaattcgtaccctgggcggagttggactgggacaaaacaagtcgttgcaaattatggaaattggtggatgtgtatatctgcttggtgtaggtgaagacatccagttgatagataaggtttcggatctggaagaggcccaaagaatcattgattccttcgaacgagatgctgctgcacaacaaggaaatctctcacctctcattgccaagctcacaaaacgtttccgtaaagaagaaccgccgcgggaaatggaactagaggacacaacttcttttcacgaaatgtttgaatccaaacttcggcagatgcctaaccgtaaagagaagatggaaaagctcctggataaagacaatactacagatcggtcgagggattcatgaagaaaaagatttggttagcgtgttgtttattaggacttatcagtctggcatctgtaacggttgcctttgccgaacccattccgaatattgatattcagattggaaacggtgatggagggacaccaagcacgagttcactgtccatcattctgttaattacagtgcttagtattgctccagcaatgcttgtactgatgaccagttttacccggattgtaattgtgctcggttttatacgtacatctttgggtacacaacaaatgccacccaatcaggtgctggtcggtttggcgctatttctgacacttttcattatgtcgccgacgttgtcttccataaatcaggtagcgcttcagccctatctccagggagagcttacgcaaaccgaggcacttgaaaaagcagcggatcccatgaagaaatttatgtttagtcacaccagagaaaaagatcttctgctatttatgaagtacaatcagactgaacaaccaaagacctatcaggatatcccaattactgttatggtgccggcatatgtaatcagtgagttgaagacagcattccagatggggtttatgatttttattccgtttctggttatagacattgttgtcgcgagtacactcatggcaatggggatgatgatgcttccaccggtcatgatctcattacctttcaaaatactgctctttgtccttgtggacgggtggtatctggttgtcaagtcactgttactgagttttaacacttgatccggaaagttaaaggaggacggtcatgacttcggaatttattatcggtctggccgggaaagcggtatacacgtcattgctggccagcgcacctatgcttatactagctctggttgtaggacttgcaatcagtatttttcaagcgacaactcaaattcaggaacaaacattagcttttgtgcccaagattgttgccgtacttctggcagtacttttgtttggaccttggatcttaaatatcttggtcgatttcacgtttaacattctcgataatctatacagatacatagggtaggctttagcagatggagacattgttgcaaagtttccctgtcgctctgcttatgttttgtcgaatcacatcattttttgtaactgcgccagttttttcggctcgaaatgtgccggcttcagttaagataggtatctctgcatttgtcacattatctgtctatctgatttacggaatagaccagaccgtacccacagacctgagttatgtcttattgatcatcagagagattctaattggcctgcttttaggttttgtggcttatctgttgatgacggcagttcagactgcggggacctttatcgatctacagatcggttttggtatggccaatgtatacgatccaatgacaggtgcttcagctccacttacgggtaacttgaagtatgcatttgctatgcttctgtttctgacgatgaatggtcaccattatttgctggatgcgatagtttacagttaccggtgggtaccattatctaatgtgtttttcctacggttggcagatggaagtattgctgaatttttgattcagaccttaggtcaatcatttatgctggcttttcagatgtcggctccgattgtagttgctttgtttttgacggatgttggattgggttttttggccaaaactgctcctcaatttaatgtatttgcagttgggttgccgcttaagttactcgttggtcttgctattttgcttttgctggttcccagtttctcctttgtatttagtcaattgttcgaagcgatattcagatcgatggaaaaattgcttggaaccattggacaaaggcccggctgagtgaaacggaggaaaagacacggatgaaacttcaactcgacctccagttgttttcaggggagaagacggagaaagctaccccgaaaaagagacaggatacacgaaaaaaaggacaggttgtaaaaagcgctgaactatctggcgcatccattctcctaatcgtgtttttgatcatgatggtattcagcaatttctataaagaacgtatagttcgtctgtttacagatatcttcatcaatcgattgagtatggatatcaccggagagaatgtgatggcgcttatgatgcgctatggcattgaagttttgttattgatcgctcccgctttgctgggtgcgttactggttgctttgattgttaactacatgcaagttggttttcttcttgtaggggaaggattgaagccaaaacttgagaaactggacccgattaaaggtttcaaaaatatattctctctccgctcattagtggaatttgctaaatccattttaaaaatgtcgattatcggttatctcgtttacagtacaattaaaggctaccagtcagatattgcttcactttctcatttttcattggatgctattttacatttcgctgcgtcgatcactttaagtcttggtatcaagattgcagtggcattaatgatacttgcgatatttgattacatgtatcagaagtatgaccatgagaagaagattcgtatgtccaagcaagacatcaaagacgagtacaagaaaatggaaggtgatccgctgatcaaaggtaaaatccgggaacgccagcgtcgtatggctatgcagcgtatgatgcaggaagtgccaaatgcggatgtaatcatcacgaacccgacccactttgcggttgcgctaaagtatgaaggttctgagatggaggcaccacagattattgccaaaggtcaggattatgtcgccttgcgaattaaggaaattgccaaagaaaacggtgttattacgatggaaaacaagccgctggcacgggcattgttccagagagccgagattggtgacgctataccggccgatttgtttcaagcggtagctgaagtgctggcttatgtatataaactaaagggcagaacgaaataaaaggggatcggaggccgtacattcattgaagattaaagatatagctgtccttgcgggtatcattggcattgtgttgatgatgattcttccgatcccaacctggctgttggacttgttgctggtcgtcaatatttcaattgcactgatgatactccttgttgcaatgaacagcaaagaagcgttgcagttttctatctttccagctttgctgttgatcactacactattccgactggctctgaacatttcgactaccaagctaattcttggtgatggggatgctggagctgtagttgctacctttggtagctggattgctggaggacagattgcaattggatttatcgtgtttttaatcctcgttgtcgttcagtttatcgttattacaaaggggtctgagcgcgtagctgaagttgctgcccgattcaccctcgatgcgatgcctggtaaacaaatgagtattgatgcggatctgaatgcgggtctgatcaacgagcaacaagctcgtgagcgtcgttccaaaattgaacgtgaagccgatttctatggagcgatggatggagcaagtaaattcgtaaaaggtgacgcaattgcaagtattatcatcctcctgatcaatctcattggtggatttattatcggtatgactgtgcatgggatggctttcgcagatgcgatggcaacgtactctgtactgactatcggagatggattggtaagccaaatccctgctctgcttatttccacagcagcaggacttatcgtcaccagagcgtcatcagaaggaaacctggcagatgatattacggggcaactgtttacatatccaatactaatttatatcgtagctttcgttattgccatgctcggtttcttcacaccaattcatgttattactacgcttccgttggcaggtgtgttggcatatgccgcgtggcgtatgcagaataatctgaatttgaaacaagtagcggaagaacagttggaagaagaacagcagattgaagaggttagaagtcctgaaagtgtaattaacctgcttcaggtggaccctattgagtttgaatttggttatggtttaatcccgcttgctgataatcagcagggtggggacttattggatcggatcattatgattcggaggcagtgtgctcttgaactggggttggtcgttccggttatacggattcgagataatatccagctcagacccaatgagtatgttatcaaaatcaagggtaatgtggtaggtggcggagaactgttgttgaatcattaccttgccatgagtcctggctatgatgaggagtctgtgacaggtattgaaacgacggagcctgcttttgggcttccagcactatggatagatgaagtgaccaaagacagagccgaacttgcaggatatacggttgttgacccgccttccgttgtggctacacatctgacggaactgattaagaaacatgcgcatgagttacttggaagacaagagacaaaagcacttgtggataatctcagagagaactactctgcccttgtggatgaactgatcccttctctactttccattggtgatgtacagaaagtgcttgccaagttattgcgtgagaaaatatctattcgagatatggtgaccatcttcgagacactggctgactatggtacgtatacgaaagatcctgatgtgctgactgaatacgtcagacaatccctctcacgtcagattactcagcagttctcacagaaaggtgagacacttcgagtgattacggttggacctggtcttgagaagaaaattgctgaaagtgtgcaacaatcggatcaaggcagttatcttgcgctagaccctgtatctacacaaagtgtatatcagaagctcagtgaacaagtgaaccgtttgattcaatcaggtcaacaacctgttgtattaacttctccaaccattcggatgtatctacgtcaggttattgaacgtactatgcaggacattcctgtgctttcctacagcgagttggagccgaatgttgaaattcaaagtatcggggtggtgaacttatgagagtaaaacaatacgttgttgagaccatgcccgaagctatgcttcaaattcgcaaagacctgggaagtgatgccgttattctgtccaccaaagagattaaggtgggcggtgtaatgggaatgtttcgcaaaaaacggatcgaagttgtagctgcagtggataaggaagaaaacaagcaaacaacaaagccagtacaaaatcaattcacacctgtacctcgtgcatttgtacctgaggcttatcggcaaacagctcgttcgtttgttgcggcttctgatgagtcggtggcaacgaatacagctgatcaaagtgtacaggaccaatctgcggctgcaccgtctgtgtttgaatcgcgtaatatcggttcaaacatagacagcggctcaggttcttcgagcacggatcataaaccgcgaccgcaaggggcggatttttcgggttcaacaactggtccgaagccaacaggttctgacctgcagcaggataagttgatgactgaattgcaggatcttaaacagatggtgaccaggctttcaaagcaaggtacttctgcagaccctgtgccagaggaactgcatacgatccgagaacgtttgacagaacaagatgtttggcctgaagtgtgggaatcctggtttgattcaattcaagcaaaatggtctgaggatggattaaaagaacagggtgtagagcaaatagtgaagcttgagattatgcactttttggagcaacgtattgaagaaggcattcttcctaccacgcgaatcgtctatgtagctggaccaaccggtgtagggaaaacgacgacaattgcaaaattggctgctgaacaaatgttcaaaaaacagcgtaaagttggattcattacatcagatacgtatcggatctcggcggtagaacagcttagaacgtatgcatctatactgaatgttccacttgaggtggtgcaatcgcctggtgatacacaacgtgccatttctcgattagagaattgtgatttgatctttatggatacagcgggtagaaactacagaaatgaattacttgtttcggaactgcaaagtttgcttgctcctgtagagaatagcgaaacctttctggtaatgagtatgacttccaaaagtgctgatatggtgcagatcacggaacatttcagtaaatatggactggataaggtgattttcaccaaaatggatgagactgggagctgcggtccgctatttaacttgttacaccgttttccactcaagctcgcatatgtggcaaatggacaaaatgttccggacgatttgttgaaaccagatgcagattcgttgtccaaacagttgctgggagaatggtcacaatgaaggatcaggcagctgcacttcgaagtatggtctccgcgccattggaattggaaggcattgaacgagatattcgatcctcgaaaatcattactgtggccagtggtaagggaggtgttggcaaatccaatttcacactgaactttgccttggcattgcaggctttggggcaaaaggtacttgtatttgatgccgatattggaatggctaatattgatgttcttatgggtacgtcttcttcctataatctttaccacctgttgtaccgacaaaaatccataagggaaatcatacaactgggtgccagtggcttgccttacattgctggaggatcgggcatgaaagagttgttctcattgtctgatcgtgatctggagtttttcgccagtcaagtcgaggatattgcccaggaaatggattatgtcatctttgacactggggcaggactctccagagagaatatgaagttcatcggtgctgctgatgaatgcctgattataactacacctgaaccgacttcaataaccgatgcttatgctttagtcaaagttatgcacggccaggaaaatgctacgccctttcggatgatcgttaaccgggtggaagacgaacgagaagcggaacgggtggcagaaaaaatagctggagtggcgaggcggtttttgcagacggatattccgttgcttgggtatatttcagaagatgcccaggtagtcaaggcggttaaaaggcaaatgccctatagtctggcttatccgaatgccaaagcctctaaagatatagagaaacttgctcttcgttatctggctgtacctgcaactccgggatccggaaccttgacaggaatcaggggatttatgaataagtggcttagacggacaacatgatttctgaataaaggaaacaggggtgacacaacatggcggcgtatcaagtattggttgtcgatgattccgcttttatgcgtaagattgttacggatttgatccaagcggatccggaattcaaggttacggcaacggcatcaaacggtagagaagcgattcaaaaatcactagaattgaaacccgatattattacaatggacgttgagatgcccgaaatgaatgggttggatgcattaaaatcaattatgaaggaatctttcgttcctgtgattatgctctctggtatcaatgaacaaggcatgaaagaaaccattatggcgcttgaagccggggcatttgacttcattcgcaaaccatctatttcacatgaccaggatattgctcaagttggtaaagccttggttgagcgcatgcgtgctgcgatgaatgagatcaaaagaaaagctgatcgtgagttatccatgaaaaatagagacatgttgcgaggagcagttgctcccccaactcagccagtgcagaaagaactgccggctagggatcgagcggagcctgtaaaaaaaacgatcgaacctgtcgagacgattcaacgctctcttcgagagcggactgaagcctttcaggccaaagccaagaaaccaattgaaccattgtcaccttcaaaaccaggtcgcgtagagaataaaccggagcctttgccaaaggctgagcgtaatttggggacgaaggcagaaaaagcagtgaggtcagctaatccagtacagactccaaaggaagttcgactacctaatgcagctagagtggcagctgatcaaatagcggcaacttctgcctctgcaaaagccaaggatgtaatcaagcctaatcctgttcccaaaggtggaggagggctggaaggaccattcaacaaacttgtggcaataggttgttctacgggtggaccgagggctctcaagacattgctcgagcagttgcctgctgatttgcctgcaccggtcattattgtgcagcatatgccgcccaatttcacacgttctctggctcaacgattgaatacattcagtccactgcatgtggttgaagctgaagagggcatggttctgaaaaaaggaaccgcctatatagcacccggcggattccatgtgaaagttaacaaaacagcagacgggaagtttatcgtgaagttgactgaagatcaaccagtgaatggacatagaccttcagtggatacgatgtttgagtcacttctaccgtttacatctttacaaaggcatcttgttttgctaacgggaatgggaagtgatggagcacgtatgatgaagcgattatacgaagctggagttacatcaacctttgccgagaatgaagaaacatgtgttgtatatggtatgccgcgttctgctgtagagctgcaatgcgttcgtcatcttctgccattgcaggagattgcttctaaacttgttcaagcagtgaaataacggagtgtaactcacggaggaggtgcctcacaatggacatgaaccaatatttatccatgtttattgatgagtctaatgatcatctgcaatcgcttaacgaaaacatgcttcaacttgaaggcaatccggaagacctgggcatagttcaggttatattccgctctgctcataccttgaagggtatggcagcaactatgggctttgaagatttggcatcactgacacataaaatggaaaatgtgttggatctggttcgtaatgagaagttgaaaatgcaggattacatttttgataccatgttcaagagtctggacgctttggaaactatggttcaggatattaccgaaggtggacaaggtaaagcagatgtgtcgtcaatcgtagcttcacttcaagccattgaaaatggtgaaatgacaaacggaaatggacctgctacagaaacaaacaagccggctaacgcttcaatctcttcggctgtggagctggatgaattccaatattcagtgctggatcagtcgatcgccgaaggtcatcgtgtgttctacgtggatgtgcttgttagcgagcatagccagttaaaaggtgtacgggcttatatggtctttgatatgctggaacgttcaggtgaagtcgttaaggcttacccatccgttcaggatattgagcaggagaagtttgagcgcagtttctcgttgtattacataacaactaaagaggcgcacgaactggaagaaggcatcatgagtatctctgaaattgaaagtgcaaagctcattcaactggatcaggagactcttcagcagatggccaatcaggtagcagctacagttgaagcgccacccgcaccaacagctgtagctgaggttgcttcgccggataagaattctgtacccaaagaagaaaccgcaacggcaccagctaaaacagctgcaccgaagcaagctgctgcaccttcacgtaccattcgtgtagatattgaacgtctcgacgtattgatgaacctgttcagtgaattgttgattgaccgttcacgtctggagcaactggccagtgaaacaggcaacaatgatttatccgatacagtagctcatttaagtcgagttagcacagatttgcaaaatattgtactgaaattgcggatggttccggtagataccgtatttaatcgattcccgcgcatgatccgtgatctggctaagacacttgataaaaaaatcgatctggtgattacaggtgctgagacggaactggatcgtacggtaattgatgagattggtgatccgcttgtgcatttactgcgtaacgcggttgaccatggtgtggaatccattgcagagcgtgtagctgcaggtaaaccagagatgggtacagtaaacctgcgtgccttccacagtggaaatcacgtatttatcgagattgaagatgatggtaaagggatctatcgcgacaagcttttgaaaactgcgatcaaacgtggtgttgtaaccgaagaacaaggtgccaagatgagtgacgatgaagtgaatcaactgttgttcgcacctggttttagtactgctgatattatctcggatatctctggccggggcgttggcttggatgtagtaaaatcgaagatcacttcgcttggtggtaatgtaacgattcattcaactccaggcaaaggcacgaacttctctgttcagcttccgttgacactatccattattgctgcaatgcttgtacgacttggttctgagaaatatgctgttccgttgtcctccattgtagagacggccattgtacaacgtgagcaagttcgtaatattcacggcaataaaatgatcacattccgtgagtcactgattccgtacttgtctttgagcgaagtattctctgtaccggatttcaatgatgctgatgagcaagaaacagaaattgtcgtgattcgcaaaggcgaccgtcttgcagccgtagctgttgaagaatttattggacaaagtgagattgttctcaaatcaatgggaacctatcttcctgctattgaaggaatctctggagcaaccattctcggagatggacaagtagccctgattcttgatcctaatgcatttattaaataagcatagagctaagtcttacatttaatagggaggttttttacatggaagaagagttgaaagtcatcgtctttaaattgggttccgaagagtatggtattgaggtagacaaggttcagacgattgagcgcatgatgccaattacccgtgttcccaagacactttcctttgtaaaaggagttattaatctacgcggtgttgtaattccagtcattgatctacgcggtcgtttctcccttccggaaacggaatacacggatcagactcgtattgttatcgtaggtgtagacgacatgcaagttggctttatcgtagattctgccaatgatgttattgatatcaagagcagtgcgatcgatagcccaccagaagtggttggcggcgtcaaagcgagatacctgcgaggtgttgctaaattggaagattcacgcttgttgattatgctcaacctaaacgaagtattaaataaaagcgagattgtacagctggaaagtgttgagggctagtaccgtggagatgttcaaccgatttgaggtattccagatggatgtgctcaaagaggtcggtaacattggagcaggcaacgccgcaacggcgttgtctcaactcctcaacagaccgattgacatgggtgtacctacagtacaaatgctcccttttgaagaagttgccgaaaaagtgggcggagatgaacgcatcgtggttaccgtgtttcttcgtgtagaaggcgaagcaccgggaaatcttttctttatgatgacaccagaggctgctaaaatgttgttgaatagacttgccggatttgatctgaaagaaggactcgattttacagatatggaacaatcagcgctttccgagattggaaatattttggctggatcctatctttcttctctggcagatttcacgaagttgtctatgtatccaactgttcctggacttgccatcgacatggcaggtgccattctaagttatggcttgctgcaatttggcgagatgggtgacgctgcattgttgattgacacatctttctttgaaggtgaagatcaagttgagggtcagtttttcctcattccggatccaccatcctttgcaaagatatttgaatcgctaggggtgccactgagctatgattgaggacaaaagcgtcgttaaagtcggtatggcggatttaaacatcgctcatcttcctggtgtaatccgtacgactggcttgggttcgtgtgtgggattaacaatgtatgacccacatttgaagctggctggaatggcgcatgtcatgcttcctacttcagagatcgcccgtgaagggaaactgaacactgcgaaatatgcggatacggcgttgcctgagcttttggaaaagatgattaaactaggcgcttctcactcacgtattgtgtctaaaatggccggaggctctcagatgtttgcctttgctggcgctggagatacaatgcgtattggaccaaggaatgcagattcttgtcgagagtggcttcaaaaactcaatatccctcttctagcagaagatacgggtgggaattatggacgaacgattgagatggattgtgaaactggacttttgactattcgaagcgtacaaatgggtgtaaaggaactataagactatgataggaaactaccgcattaatcttggagcaggcatcgttgggtttattcttactttttttgtagcatacagcagcaatgtgctgatgaccagtttaattcgcggattgatcggattcgtagcctggtttgtccttgcatatggtttacgctggggattgggattgctgctgaaccctcagattgagggaaatgggtatggttatgattcaccaagtgctcaagatcaaagaggttcacaggtggacattaaaatcgaagacgatggacaagagctgaatgatttgctcaagagtggacagaacgcttcatctggggacgatcttccgccatctgagacgaaagctccaacgggattcgcccctttggatccgcctaaacttgtccggaccaaggatccggaggaattggcgcaggccgttcgtcacctgacagacaaataaggagggtgaaagtaattgaacgagcgtaaagcttcacatttgaaccattctgatctgtgggaaaagtggaaagaacatggagatcttgaagccaagaaaacgttgattgaaaagtatcttcatattgtaaattatgtatccggtcgactggctgttggtttacccaaaaatgttcccaaggatgacttggagagcaatggcgttatggggttaattgatgcattggagaagttcgactatgaacgtggtctgcaatttgaaacttatgcatcatggagggtccgcggagccattcttgacggtctgcgtcaaggtgattgggttccgcgttctgtgcgtgagaaggccaagcgaattgaagacgcctaccaacagctggaacaaagttatctcaggtctgttagtgatgaggaaatgagcgagtacttggacgtatccactaaagattttcaacatatgcttcaggaagtggcagtcatgtcactttgctcgctggaggacccaattcgtgaggaagagtctgagactcgtctgtctttgatggtggatgagaaagccaaaaatcctgattataaagtgaatgagttttatttgaaggaagctttggtgcaagggcttgacaagttgacggtaaaagagagaacggttgtttcactcttgtattacgaagatctttctcttagtgaaattgctgaggttatgtctctttctccgtctcgtatatcccagttacattccaaggcaatattacgattacgcggcacgttggacaaacagaaagatttgttgatgcgtaaagattaatagagagaagtaatatcattggagtttggggagtggaaagtctaaaagggggaagaattgcggtgacacagcggactgctttggaacaatgtttaaacattgttttatcggacgacaaatgcacagcctaccttgaattttccaaagaggaagaaggctttgcttgcacgatcgatgaacttgaacaatttgtggcaaacaagggcatcaaacaaggtgtatcgcgagaggcattattactttttgtgaacaaccctgaaacctatttgaaagataaatacaagattgcagaaggtgtcgctcccattcaaggaacagatggattcatcaaggttctggttggaatggacgatacgaatgaacgacgaccactggagtcggaagatggaactgtcgattacaaagaagtgacccggttaaacaatgtccgtagtggccagatcattgcagagcggatcgctcctagcgatggcataccaggcagggcagtaacgggtgaggaaattccttatcgtccgggaaaagaagctcggtttaaagttgggaaaaacgttgtgattaacccggatggttctgcgatgtatgctgcactggatgggctggttaccaaaacggacggtaacaaactgaatgtgtttccggtttatgaagtcaatggtgacgttgactacaataacggtaatatcgactttgtaggcacagttgtcatacgaggcaatgtacttaccggatttaaagtaaaagcagcaggtgacattcgtgtcgtcggaggtgtcgaaggagctgaactggaagcaggcggctcaatcgaaattaccggtggtattattggttataacaaaggactggtacaagcaggccataatgttaaatgtactttcattcaagaaggcaacgtagatgccggtgaagatgttctggtttcccaaagtattatgcattccaatattcgtgctggccacggtgtcatctgtgcgggaaccaaaggccttatcgttggtggctcgatccaggctggtcagaacgtctcagcgcgtgttgtgggcaacagcatgtccacggtcacttccattgaagttggtgtgctaccaaagctgcgtaacgaactcaatgatttgcgcaaggaagtcagagagcagatggattccttggacaaaacgaagaaagctttgacattgctggatcaattagctgccgctggacaactaagtccagataagatgtcgatgcgaatcaagctgaatgctacgcagaaatctgctcttcgtataagtgaagaaacgaaaatgcgtatctttgaaattgaaaaggcacttgaagatacaagtaatgctcgtgttgatattctgaagatgatttatggaggctctaaaatagttatcggcagatacacgaaatttattaaagatccagtgagtcgaatttcattttattatcacgatggtgatattacgatggttccatacgtttaagtacagcattcaggcacaggaagaaatccattcgaaaccgtgaggtgagcgtatgagtttcaaagcagtggagttgcagattgcggtaccacgaacaagtgaagcgggacgttatcaaagtgaagcccagcagcgaccaattacggatcagaatcttttggcagagcaaacgtcgaaagaagcaaatgaagcaaggcaacgaagtgaagcaatggacgaaacttcacagacttcggtgcgtgatggtcataaccatgatggggatcagcagagtggttccgatggacaggagacggctcaggctcaagctcaagaaactgtcaaacctgcagagcacccttacaagggaaaacacatagatctgtctttataataaatggttgttatggacatgcagtcttgcgcaccgatggttgaatcagaaggagagaacccaatttgtcaccatggatcattattgtcatattaggggcctgcgccatcgcctacgcttgtattatgcctcggaaaaacaaggcgcaagagcctgggcatcaactggtgcaggagatggaatctacgcttgaacactacatgaccgagatcgaaaatgataatgatgctcttattcaacgtgtggctgaaatgaagggagaagcgacagcagccgatcaacgtatgcaattgcaacttcaggaattacagcagcggttggatcagctggaacagagcaaaaagaatgaagctgtcgcatcacctgttccacactccggtaatgtatccgtacaatcttccgaaggtttgcaagcacaagcgctcgtgaaaagtgtacaagcagaggcggcccagcaggcgttagaagcagaccaacagaccagtgaagtcgaatctttgcctgggcgtgaatcgattaaagatcgatatgcagaactctttaatctacatgctgaaggtaagtcgatggatgccatatccaagcagacaggcattcagcgaggtgaggtacagttaatactgcaactggcagaacgggaggaaagctaagtcatggacaagcgatccttatggattggtctggggagcggcatgattattggtgcggttttgcttcaactggccacagttggacaaaatgcattgtcggatagtaatctggaccccgagcagactgccaatatgaccaaagaacagcttgaaacggccgcgaaaaccttggatatgaagttggtcggttctgaagaggaactatacacagaagcagagtgggtggcaaagaaaaagcaggagagcagtgagttgcaggggagtacagcaacaccgccagagacagcaacctctacggaaacacctaccgagcctgagaagccacaagagcctgctgcaagtgaaggtgaagggcagaaagagataactgagccgaagacaacagaacctgtaacgccaagcaatccgaaaggcgcaacagtatcatttaaagtacgttcaggcaacagtctggcgatcgttgcagcaaacctaaaaactgcgggaatcgtagatgatgctcaagcattcataaaggctggcaaggctgagcgaatcaataccaaaatccaggtgggtacctatgcgcttgaaaaaggcgaaagtttcaaatccattatcgcaaaaatcacgaaagaaccgtcaaactgagcatgctcggacaggacggtttttgcgtattaaacggtacattttcaaagcttgataataattagcgcctgagttacatatcaagtttaaaatgattcgatactagcaaaaaacgaaaagtagattttagcttcaaagactgttgcatcggacagtcagttatgctatattagataacggtgttaaaacacacgcatgtgctaattttgttgagggtgctttccttatggagagtcttggcgaaaaatgatgccggcggaggacacaataaaaaccatattaggaggtgtgtgaagatggcagtaatctccatgaagcagcttctcgaagctggggtacacttcggtcaccaaactcgtcgttggaacccaaaaatggatcgttatatcttcactgaaagaaacggaatttacatcatcgatttgcaaaaaacggtgaaaaaagtcgaagaggcttacaatttcgttaaaggaatcgcaggagagaatggtaaaattcttttcgtgggcactaagaaacaagctcaagattctgttaaagaagaagctgaacgtgctggtcaattctacattaaccaacgctggctcggcggtaccctgactaacttccaaactattcaaaaacgtattgatcgtttgaaacagttggaagcttgggaagaagacggtacattcgctgtattgcctaaaaaagaagttatcttgcttcgcaaagaaaaagatcgtctggagaaattcttgggcggtattaaaaatatgaaaggcctgccaagcgccctgttcatcatcgatccacgcaaagagcgtatcgctgttgcggaagctcgcaaattgggtatcccaattgttggtatcgttgatactaactgcgatccggatgagatcgattatgttatcccaggtaatgacgacgcgatccgtgctgttaaattgctgacaggtaaaatggctgatgctgtaatcgaagctaaccaaggcgaagaaacttccgcttaatagattcgaacatatgttataaactaaattaaaagggtggttggcaggtggataacctctcactgccctttttttagagtgaacgtacaatacttaatgttggagggaatttataatggcagttaatgcgagtgcagtaaaagaacttcgcgaaagaacgggcgctggtatgctcgattgcaaaaaagcactggaagaagcaaacggtgatgtaacaaaagcggctgaattgttgcgtgagaaaggtctttctgcagcagcaagcaaagcaggccgtgcagcaactgaaggcgttgtagaatcttacatccacgctggtggacgcattggtgtcttggttgaagttaactgtgaaactgacttcgttggtaaaacggatcaatttaaggatttcgttaaagatgtagctatgcaaatcgctgcagctaatcctaaattcgttaaacgcgaagaagttcctacagatgagctggaaaaagaaaaagaaatcctgaaagctcaagctcttaacgaaggcaaaccagagaaaatcattgaaaaaatggttgaaggccgtatcggtaaatactacgaagagtactgcctgatggaacaaactttcgttaaagatccagacaaaacgatttcccaattgctgaacgaaaaaatcagccaaattggtgaaaacatctccatccgtcgtttcgttcgttacgaactgggtgaaggtcttgagaaaaaagtagacaacttcgtagaagaagtaatgtcccaagtaaataaataagacggtttctatagaccggcgagcagaattgattttcgaagatataagaatgatgaaacttcgaagcgtaaactcccttatatctcaggaaaacagtgaccggttaaacgtttttcctaaaagagcggaacacaactgtgttcctttctttttaagcaggaggccatgcgcgagaagttttgttggttgaacaccaagcgtgttcgattcaaagtggagggtgaataattggaacagccagtatttaaacgtgttgtcttaaaggtcagcggagagtctctttccggtcaaaacggctacggtattgatgcagatacgatctcgtcgattgcccaacaggtaaaagaggttgttgcacttggtgtacaggttgctattgtatgtggcggcggaaacatctggcgtggaattgccggtagcgaaaacggcatcgatcgtgcaactgccgattatatgggtatgctggcgacagtaatgaactcgctggcactgcaagatgctttggaacagattgaagtgcctacgcgtgtacagacatctattgcaatgcaacagattgcagagccttatattcgtcgtagagctattcgccatctggagaaaggccgggtcgttatttttgcagcaggtacaggtaacccgttcttttccacggatacaacagcagcactgcgcgcagcggagattgaagcagaagttatcttgatggccaaaaataaagttgatggtgtatactcagcagatccgtttaaggacagtacggctgtgaaatttgatcagttgacttacatggatattcttaacaaagaccttggtgtaatggattcgacggcatcctcgctttgtaaggacaacaacatcccgttgatcgtatttgccattacggaacaaggtaacatcaaacgtgttgttctgggcgaacgtatcggaacaatcgttaaagggagtgtagattaatgccacaagcggttaaacaacatgccgaagagcgtatggaaaaagcaattcaagcattgcgtcgtgacctggctagtttgcgtgcaggccgcgcaactccagctcttctggaccgaattcaggtagagtattatggagcaatgacgccattgaatcaactcgctaatatcagtactccggattcccgtacactgatgattcagccttgggacaaatcctccatgggtgacatcgagcgtgccatcatgaaatcggatctgggtcttactccagccaatgatggcagcatgatccgtttgtctattccggcattgacggaagaacgtagagcggaacttgttaagctgacgaagaagttcggtgaagaaggtaaagtagcgattcgtaacattcgccgtgatgcgaatgatgacattaagaaaatggaaaagtcagatatttccgaggatgaatcccggagacatcaagatgatatccaaaaatcgaccgacaagtttattgctgaagtcgataaggtactcgctgccaaagaaaaagaaatcatggaagtgtaagacaagcgcagcccctccaatacggtggggttttgtctctttttccaagcttcagataaagaaacttcagggattttggaggaacaggaatgatcaaacgggttcggtcgtggtggaatggggctgacaagcaggaaacgctgactatatccgaggacaatatcccgcagcacgtcgccatcatcatggacggcaatggacgatgggccaaacgtttggggctgccgcgtatagccgggcaccaaaatggcatgaaggcggtcaaacgtgcgaccatcgcggcggatgaactgggcatcaaatatctgacgatgtacgctttttcgacagaaaactggacgcgtccaaaagaagaagtggattttctgatgcgacttccgcaagaatttctagctatagagctggatgaacttatagaaaaaaatgtgcgcattcgcatgatgggtcaagaggaacatttaccttctcataccattaatgccttgcgggaagccattcgtcttacggaacataatacaggtctcgttttgaattttgcaatgaactatggaagtcgtcgtgaaatgacggactgtgttaaacagatcgctctgcaggtgaaatcgggggaactatcggcagaggatataacacctgaactcattgatagacatatgctgacggttgacatgcctgatccggatctgctgatccggacgagcggagagttgagattaagcaactttatgctttggcagcttgcatatagtgaattatggtttacggatatatactggcccgaatttggcaaaaagcatttgcttgaagcaatagccgaatatcagcgcagaacaaggcgttacggcggtttgaaatagatggaggatgaagccgttgaaacagcgactaacgacaggaatcatagcaggtgtgttgtttttaggtttttgcatgctgggcggaccctggtaccatggtttggtattgcttatggctctcatcggttattatgaatttgttaaaatgaccggggtgatgcctttttcaggtgtggccctgattggatatgctggtgtttttgccattgtgtttccttgggaaatgctttgggaggcaagaccgctatccttatttcaggtcatctggatagtaatgcttgtactgatgacagcttcggttgtcaccaaaaataaggttcccgtgaatacagtggccatgcttttcctcggcgtgttgtatatagggatcggtttctattacattgcagaatccagacatctgcatcatgggttgttctggacgttcctgttgctgggctccatatgggccagtgatgcaggagcttattttgtagggaaactcattggtaaaaacaaactgtggccttctatcagtccaaacaaaactatagagggtgcactgggtggcatcgtaattgcaattgttacttctgttatttttgcattagtatcagatggtttgctttcctggcagagagcgattgtgatcggaattgcctgtgcagttgtaggtcagatgggtgacttgatccagtctgcatacaaacgtgtatataatatcaaggattcaggcagtcttctcccagggcatggaggcattcttgatcggtgcgacagctggattgttgtttttccattcgtacatatactaatgctactgccctactaaagaagaacatgagtctgagataacagcattgttcgccgtaggcattggataattaaagatgaggtgcagcatgaaaaaaattgcgattcttgggtcaaccggttccattggaacccagacactggatgtagttgacatgcatccagaactctttcaagtggagggactggctgccggaggcaatacagacctgctgatcgaacaaaccaaacgttaccggccgaagaaagtatcagtggggtccaaagaactggcggagaagatagctccacatttgccagcaggaacgcaactattttatggcaacgaaggactcgtagaagttgcggcaggaaccgatgcgcatacggttgttacagcggtggtgggcagtgttggattggagtcaacgcttgctgccatagatgcaggcaaacagatcggactggccaataaggagacattggttacagcggggcatatcgttacgacaagagcagctgccaaaggagtctctttactgcccgttgatagtgagcactctgcgatattccaatgtttaaatggtgaaaacagagaacgcctgacaggcatcacgcttaccgcttcaggtggatcattccgtgatcttacccgtgaacagttgaagaacgtgactatagaggatgcgcttaaacatccgaattggtcaatgggctccaaaatcacgatagattcggcaacgatggttaacaagggtcttgaggtcattgaagcacattggttatttggtcttcgatatgatcagattaatgtattgcttcacccagagagtgttattcattcatatgtggaatttgatgacacaagcatcatcgcacaactggggaatccggatatgcgagttccaattcaatatgcactgacttaccctgaccgcttgccatcaccggcacagcgtctgtctcttgctcaagctgggaaattacatttccgtgatatggatatggaacggttcccgtgtttaagaatggcgtatgagtgtggtaaaatgggaggaaccgcaacaacggcgtttaatgcagccaacgaggttgctgtagcccgtttcttgcgtaaagagatttcattccttaaaatagaagatattattgcttctgtgctggaagcacaccacaatgtggacgagcctgatctgcaggagatcgcacgttgtgatcaggagagccgtaagcttgcggccagtctgtaatctcttttttcattacaaattggaagaagtgattctcttgtgcggcatcagagaataatgataatctagagggacagactgcggtatgtgccgtgaaggaggatggatagggattggaaaccatacaagtggtatttctaacggtgctcatgttctttgtcatcgtgacggttcatgaatgggggcattattattttgccaaacgcgccggtattcttgtacgggagtttgcgatcggttttggtcccaaattgttctcatataaaagaaacgagacccagtttacattgcgtttgttgccttttggtggatatgcacggatggcaggggaagatccggaactggtagagatccaggaaggacagaccattgcggtaagatcagcggatgaccaggtgaagatgatctatctggatcaactggataaccgtaaaaatgtaatacgtggcgaagtcatctccattgatatggagagagcgctgaagcttcaactcgatgtagatggagagattcaggagtatcgtattcatcctcaagcaatgttggtaagtcgtggtaaacaaacgcagattgcaccgaaagatcgtcaattcggcagcaaaactgttggacagcgtgcattggctatttttgcgggcccactcatgaactttatcttggcctttgtgctgtttgctgtatatgcccagatggcaggagttccagtggaaaatccaaaaaatcttgtaattggtgaagtgcttgaaggtggggcagccgatgaggcgaacctgcaaaagggcgatattatcgaaaccatcaatggtactgcaattggtacggattcacaaaaaatggtgtcgatgattgccgattccaaagacaagccgatggaatggacgttgcgccggggttcggatacgtttaatataacgattacaccacgtgctgtagaaggacaagagggcggtaaagtgggaatcgtacctacgttaccaacccgatctgttggatttgtagagacatttaaagtctcaggcgtggccatggttgatacaaccaaaataatatttgaaggttttaaacatctgatcaatcagttcaacatggatgatatcggtggtccagttcgcacatttgaagtgacaggacaaattgctaaacaagggattgaacagttaacgagatgggcagcgattttgagtctgtaccttgggattttcaacctgctaccaatacctgcactggacggcagtcgtctggtatttttgggaattgaagcgctgcgcggcagacctgttgatcccaatcgcgaaggcatggtgcatttcgtcggatttgcgatgttgtttgtgttgatgctggcagtaacttacaatgatatattacgtttaattaacggataattacggttggactacgctctggacattcagagatagtcgttatgggaggacgctggagtcttatgtcaaaggaaaatgataaacagttcgtgactgaaatcacaccacagggtgaggatttctcacgctggtacattgatgttatcaaaaaagctgatctcatggactatgcacccgtacgcggttgtattgtgttcaaaccagacggatttgaaatctgggaacatattaaggatgagttggatcgtcgtttccgggaaacgggtcatcgcaacgcatacttcccgatgttcattcctgagagcttctttcaaaaggaaaaagagcacgtggaaggttttaaccctgaattaccatgggttacggaagctggcggagagaagctggaagaacgtctggcaatccgtcctacatccgaaacgattattggtcacatgtattccaagtggattcagtcttatcgggatcttccggtactgatcaaccagtgggctaacgtagttcgttgggaaaaaagaacattgcctttccttcgcacaagtgagttcctgtggcaggaaggtcatacagcgcatgagacggaagaagaagcacgtgaagaaacgatgaaaatgcttcagatttatcgtgaagtggttgaggaatacttggctattcctgtaattgtgggtcagaaaaccaagtccgagaagtttgcgggtgcggtggatacctactcgatcgaagccatgatgaaggatggacgtgcagtacaagcaggtacatctcactacatggggacgaactttgcaaaagcatttgaaatccagtatcttagccggaataatgtgctggagctggcttacactacttcatggggagtaagcacacgtttgatcggtgcattaattatggttcacggagatgaccgtggtctcgtacttcctcctaaagtcgcaccgactcaagtggtcatgattccaattggacctcctaaaacacgtgatgctgttgttgggcgtgcagatgagttgttcactgagttgaaaaaagctggagtccgtgtgaaaatggatgatcgcagcgatgttcgcccaggttggaaattcaatgaatacgagatgcgcggtgttccgattcgtctagagattggtccacgtgatatggaaaatggcgtttgtgtgctcgtatcacggatcacaggtgagaagaaagtggtagaacaagcaaatctggtagaagagattcaggctatgctgacacagatccaggtagatatgttagagcgtgctcgcacatttatgtcggataacttctactccgtggatacactcgatgagatgaaagaactgatggaaaataaacgcgggtttacactggccggatggtgcggttcggaaacttgcgaagataaagtaagagaagtcacaggtgcaacaagccggaacattccgttccagcctgctgaagaaaagcatacgtgcctggcttgtggtgaacaggcagaacacacggttgtgtttgcaagagcgtattaagtcaggataacctgactatatacattgaactaaacatttacatgagaacgtagagaacagaaataacctgaagaagcggagctaaaagctttctgaaagaaagctacatcggaagcatacactgcgcttttatccccggattttcccctttgtaaatgggaatcaaaaaatctgggggtaacagcgatcggaaggttgttctgttatcggagtggtaagtgtaaatatctttttgttcaatgtatataatggcacgtacggactgtaagagtaatgaatggagagcttctgtcggataaaatgagtcggtgcgagttcggatcggtgacatttttgaatgcaggggcttttcatgctttaagggggtacaaggaggaacacgatgagcggattcgaggagaaaagaaaacggtttgagttgttgatgaaacaggcagagcttccggctggtctgttagagccctattttttggatggatggattgaacaagtagagaccaatcgaagtaatcgggaatggaatattctgattgcaaaggatacgttggtacccgctccaatctatcgcacattttgcctgcatatccaagagaaaatgaatcatatcgccaaaatttcatttggcttcaaatacacggaccaagtacaaaatggtgatatcgtcagtgaatattggaatctctttctggagtgggttacccgtgagattccatctgtaaatggttggatgaaccggacaacctttgaatgtgaagaggatctcctacaactgacaatgagtgatgcaacgtcgatggaattggctcgtaagaaacagattgatcaggctattacgaaattctatgaaaaatactttcatctacctcttcgcatcaagatgcaagtgggtgaagtgggaagcaataaagaggccatggaacagttccaggcccaaaaacgtgtagaagaacttgaggtcatcgagaagatgatgagtgaagtggacacagaaatcccggtggatgaggagcagggtgatctgcgtttgcaaatgggttatgacatcaaggaacctgcagtacctatgcaggaaattcaggatgaagagaaaaaggtcacgcttcaaggttcggtgtttggactggatcgtaaagaactgcgaaacggaaatacgttgtttaccttctacctgaccgacttcacggactccatgcaaatgaagatgtttgccaaaacaaaagaggatgttaaaattctcagtttgttggctaacggtaaatgggtaaaagtgcgtggtcgtgtagaatatgaccggtttatgcaaattcctgaactcgccatgattccttcggatttgattgaagttaaagcaccgccgtctcgtaaagataatgcaccagagaagcgggtggagttccatttgcactctacgatgagtaccatggatgctgtaacttcaattgacaaatacgtgaaaatggcagcagagtggggacataaggcgattgcagtcactgatcatggtggggtgcaggtatatcccgaggcttccaaggctgctaagaaaaacgggattaaaatgatctacggccttgaggccaatgttgtgaatgactctgttgccgttgtaatggctcctcagccattggatctccaaacagcaacatacatcgtatttgatatcgagaccacaggtttgtcggtaacacagaacaaaatcattgagattgcagccgtgaagatgcaagatggtaaagaaatcgaccggtttgcaacgtttgtgaatccgcatgaacgcattccctacaacattcagcagttgaccaatattaatgatgacatggtaaaagacgcacctgagctggagcctgtcattcgtgagtttgtgcagtttgctggtgatggtgtgcttgttgcgcataatgcacgttttgatatgggctttatccaggcttccctgaagcaaattggaatgccagagcttcctaaccctgtccttgacacgttggaactggcgcgattgttatttccaaaaaataagaaccaccgtctgaatacgatggcagataaatataaggttggacttgaaagtcatcaccgtgccattgatgatacgattgcactcgcgggtatactgatcggattattaaatgatgctgctcagatgaaaggtttaacgaggcttgatcgcttgaacgattatgtaggtgtcgacttgtcgaatacaagacctttccattgtggaatctatgcattgaatgatgtcggtaagaaaaatctatacaagctggtatctctctctcatacggaacatttcaagcgggtaccgtgcattcccaaatcgaaactgattaatttgcgtgaaggccttgttattatatcgggctgtgaaaaaggggagtttttcgaagcggtgcttaacaaatcgcttgaagaagcggaagagatcgctgagttttatgacatactggagattcaaccacttaccatgtatatgcatttggtggataaagggttggtggctacacccgaagaaatcaaaacagcgatccgtaaagtcattgatataggcgcaaaatttaataaaccagttatagccacaggtaacgtgcactatttggaaccgcgtgacaagttatatagggatatcaccattcacggaattacaggttttagtccactcaaagatcaacgtaaaccggatgcacatttcagaacgacagaggaaatgctggaagagttccagttcctgggccaagataaagcttacgaagtcgttgttacaaatacggtggagttatctgaccgatttgaggaaattaagttattcccggacaaactgtttactccaattctggaaggtgcggacgaagaaatccgtaatacctgctatgacactgccaagtctatctatggcgaggaattaccagaagtaatcgttgcacgactagagaaagagctcattccaattattaaatacggtttttctgccaactatctgatctcggaacgcttggttaaaaaatcgaatcaggatggttacctcgtaggttcgcggggatcggttggctcctctgttgttgctacattcctgggtatatccgaggttaatccactacctgctcattatatttgtgtgaattcagaatgcaaacacagcgagtggttcctggacggcagtgttcggagtggatttgaccttccagagaaagagtgtccggattgtggtggcacacttaaaggagaaggccaggatattccgtttgagaccttccttggatttaaaggagataaagttcccgatattgacttgaacttctctggtgattatcagcctcatgctcataactatacgaaagtactatttagtgagaagagtgttttccgtgcggggaccatcggtacggtggctgagaaaacagcatttggttttgccaagaagtacgaggaacatcatcagaagaaatggcgtggagctgaattgaatcgtttggcctctggctgtactggggtgaaacggagtactggtcagcatcccggtggtattgtcgtagtacctgattatattgaggtcgaagacgttacacctgttcagtttccggctgacgacgttaatgcggagtggaaaacgacacactttgattatcatgcttttgaagaaaacttgctgaaacttgatattctggggcacgatgatccaactatgatgcggatgttgcaggatttgacaggggttgatccaacgaccattccgatgaatgatccgaaagtcatgagcatgtttaactcaaccgaagctttgggtgttacaccggaacagattaggtcgccagtcgcaacgtttggcgtgccggagatgggaacgaagtttgtacgtcagatgcttgttgaatcccagccgacgtcttttgccgatttactgcagatttccggattgtcccatggtacaggggtatggcttggaaacgctcaggatctgattaagaacggaacgtgtaacattaagacggtaattggttgtcgggatgatatcatgttatttctgatctataaaacgggaatggacgcaagtctggcatttaagattaccgagagtgttcgtaaaggacggggtctgccacaggaatggattgacgagatgaagaattgtaaagtgcctcaatggtacattgattcgtgtctcaaaatccagtacatgttcccgaaggctcacgcggccgcttatgttatttcggcagtacgtacggcgtttttcaagctgtatcatccgattgaatattacgcaacttactttactgttcgagctgatgagattgatatcgaactgatgtgtcagggatatgacgcgatctatcgcaaaattacggaaattgagcaattaggtttccaggcacctccaaaagagaaaaacatgttacctgtcctggaaatgggtctggaaatggcagcacgcggattctcgctgaaatccattgacttataccgttcagaagcgacaaagttcatcgttgacggaaaaacactaatccctccattttcagctttggcaggaatcggggataatgcagctcgcaatattgctgcggcaagagatcatggtgaattcctgtcggtggaagacttccagcagaagtcgaaagcaagtaagaccattgttgaactcctgtcgaatatgggatgtttccgtggcttgccagagagcaatcagctttcccttttctaggattgaatttggatctaaccatagcgattgttgggggaacgtaatttttccttcattagtaagtaaactgcctgaagcatcgcttacttgtcactattaccagactatgttataatttttgaagtgaacgagatagtacgaatttctaaagagtggggaaacccactctttagtctttggtatacaagaatcttgggtattgaataatctgccagtgcttttttgctggtgtaacctaagttggaggttattggttttgagcacaacgaacattaaatctaccgtggaagaaatgatccaaccctacttgaacgaacaaggcttcgagctggttgacatcgaatacgtcaaagaaggcagcaactggtttttacgggtgtatgtcgacaaagagggtggcatcgacatcgacgattgtgtcttgatcagcgaaaagctgagcgccaagctggatgagaacgatccgattccaaccatctatttccttgaagtgtcttctcccggtgcggagcgtccactgaaaaaacctgaggacgttaccaaagctgtaggcaaaaatgtttttgttacaacctacgagccggtgaacggattgaaggaatttgaaggcaagctgctttcctttgatgacgatgaactcgtgatcgaagcaggcaaaaaacagcatgccatttcttatgataaggttgccagtgcgcgcctagctattttgttttaagtgccttgttcactttattaatgaaaaagacacatctcacgataacggcaaggtgctcatgagttcagagcctttcgccgttttacgtatgagatgccatgtttgaaagggggatcaacattcatgagtacggattttattgaagcaatgaatgaattggaacgggaaaaagggatcagcaaggatgtgctgtttgaagcgatcgaggctgcactaatttccagctacaagcggaatttcaacacggcccagaatgtgcgtgttgacatgaaccgtaatacgggagttattcgggtgtatgcccgtaaattgatcgtggaagaagtcctggattcacgtaccgaaatttcattgcctgctgcacgagaaatcaacccacacttccagctggaagatattgcggagattgaagttacgccgcgtgatttcggacgtatcgcggcacaaactgccaaacaggtagtgacccagcggattcgtgaagccgaacgcggcctgatctacaacgctttcgtagataaggaagaagatatcgttacgggagtggtgcagcgtcaggatttgcgcaatatctacatcgatctgggcaaaatcgaagcggctttaccgctgaccgaattgatgccgaacgagaagtttgttcatggtgaccgtattaaggcgtatatcaccaaggtcgagaatacgacaaaagggccgcaaatcattttgtcccgtacccatccgggcctcttgaaacgtctctttgaactggaagtgcctgagatctttgacggtgtagttgaaattcgctccgtcgctcgcgaagcagggttccgctccaagattgccgttcattcccgcaacgaggaagttgatccagttggatcttgtgtaggtcctaggggaatgcgcgtgcagaccattgtgggtgagctgcgcggtgaaaaaatcgacatcgttcgtttctccgatcaggtagacgaatatgttgctaatgcactgagtccttccaaagtattggaagttcatgtatttgaggaagaaaagatggctcgggttatcgttccggactatcaactgtccctcgcaattggtatcaaaggccaaaatgccagattggcagccaaattaaccggctggaaaatcgacattaagagcgagagccaggcggaacaggaattcggcagagaaaaagattcttcttctgaaatgcatcaggattccgtctccgtcgactaaagtaaagtacggggggcgctgacgtatgaaaccaaaaaaagtgccgctgcgcaaatgtgtggcatgccaagaaatgatgcccaaaaagcagctgattcgcattgttaaaacgccagaggatgaagtgctgatcgatttgactggcaaaaaatccggacgtggtgcctatttatgcggcaaagagtcctgttttaagctcgcactcaaaaaccgggctttggatcgggcgttaaaaggcaaagtctcacctgaaatttacgagcaattagcagctgacttcatcgcggttgaggatgaattcatagcagcacaggagcgtgaacatgactaatattaaaacgctgtcttatttgggactctctatgcgtgcaggtaaacttgtaacaggtgaagaaattgtacttaaagcgatccgttcttccgaagctaaaatggttattgttgcgggtgacgcctcagccaatacacaaaagaaatttcgcgataaatgcggaacttataaggttcctctgttgatcggatttgaccgggatagtctgggttcaagtatcggtaaagacacgcgtgttgttcttgcagtaacggatcgagggtttgcaaaaatgatctccaagcaagtcggtataatgtcggaggtggagtatattgagtaaacaggaaaacaaggataaattgcgggtttatgaatatgcgaagtcccttaatatgagtagtaaagaaattataaccattcttaaaaagctggaaattcccgtaaacaatcatatgagtgtcatggagaatggttcagtcggtaaggtggaacaattttttaaagatataaaatccactgctgcttcgaaacaaggcaacgatgcaaaaccagttgcaacttcggcagtacgtagtgacaaaccagtggacagcaacaagccggccggcggagtgaacacgccgattagcagcaacccatccggtagtcccgtacaaacaaaaatacaacaggaaaagcaggtaggtatgaacaatagaccaaattccaacaataacaatggcactcaaagacccagcggccaagacagtcgcaacagaacgaactcttcccaaggctcaagccaagggggacaatcaactaaccgtccaaaaccagctcaaggtggacaaagcagtactgcatcccgtccgcaaggaacgggtcaacgtccgaataacagcggtggcggtcaagtaagaacttcaggccctaatagcggtggtaatacaggtactgctggcaaccgtagcggtggccaaggtcagagccaaggacaaggccaacgtagaagcggcccaggtggtactactggcagcaacaacaatagtggtaaccgttcgaacagcggtggcggtggacgtcgttatgatgacaaccgtggcggtaacttccgtggtaaccgtggtggcaagaacaaccgcaacagaaatcaacaacagtaccaacaacgtgagaaaattgataacacacctaagaaaatcatcgttcgtggtgatatgaccgttggtgaaacagcgaagttgctccataaggatgcttccgaagttatcaaaaagctcatcgctatgggtgttatggcaacaatcaaccaagagcttgatatcgaaacgatccttctgctttcaggtgaattcggtgttgaggttgaagtgaagattgtgcttgaagatgaccgtttcgaaacactggaagagaatgatgatgctgctgacttgcaggctcgtccaccagtagttacgatcatgggtcacgttgaccatggtaaaactactttgctggatgcgattcgttccacgaatgtatccgatggcgaagcaggcggaatcacgcaacatatcggtgcttatcaagttgaaattaacaacaaaaaaatcacgttcctggatactccgggtcacgaagcgtttacagcgatgcgtgcacgtggcgcacaagttacggatatgacgattattgtcgtagctgcggatgacggtgttatgccacagaccattgaggcgattaaccatgccaaagctgctgggctaccaatcatcgttgctgtcaacaaaattgacaagccgggcgctgatccagataaagtgaaacaagaattaaccagctatgaactcgttccggaagagtggggcggagataccatctttgttaacgtgtcagcgaaacaaagaatgggtctggaaggtctgcttgaaatgattctgctcgttgcagaagtgaacgaatacaaagcgaacccggacaaacgtgcccgtggtacagtgattgaagccgagctggataaaggacgtggcccagttgcacgtatcctcgtacagcacggtacattgaaagtcggcgatgctttcgttgcaggtaactgcttcggtcgtgttcgtgcgatggtcaatgacaaaggtcgcaaattgaaagaagctggaccttcaacacctgtagaaatcacaggtctgactgaagttccaggtgcgggagatccattcatggtgtttgaagatgagcgcaaagcgcgttccatcgctgacaaacgttcgatcacgcaacgtgaatccgatctgggtacgcatactcgtgtgacgttggatgatctgttccagcacatcaaagatggcgagatcaaagatctgaacgtaatcatcaaaggtgatgtacaaggttcggttgaagcattgaaaggttcccttgcgaagatcgaagttgaaggtgtacgcgtgaaaattattcatagcggcgctggtgcaatcacagaatccgacatcattttagctgcagcatccaatgctatcgtgatcggtttcaacgttcgtcctgataaccaggcgaaatcaactgcagatcaagagcaagtagacattcgtctgcatcgcgtgatctacagtgttatcgaagaaattgaacaagcgatgaaaggtatgcttgatccgatctacaaagaaaaagttatcggtcatgctgaagttcggagcacgttctccatcagtaaagtgggtaccatcgctggttgtatggttacctcgggtaaaattacgcgttctgcggaagcacgcctgattcgtgatggcattgtcctttacgaaggtaagctggattccctgaaacgttataaagatgatgccaaagaagtagcacaaggttacgagtgcggtatcacacttgataaatataatgatctcaaagaaggcgacgttatcgaagctttcattatggagacagtacaacgataagcaaggaagcatgaggtgaacaacaatggctaagattcgtacaggtagagtgggcgagcagatcaagaaagaaataagtctgctcatccagtctgaactgaaagatccacgtatcggctttattacggtaacgggagtcgaagtgacaggagacttgtcgcaagccaaagtttatctgagtgtcttcggtgaacaggaacaaaaagataacacgctgaaagctctggcaaaagcaaatggatttttgcgttcggagctgggcaaacgtatccggttccggcatgttcccgagttgatatttaagattgacgaatccatcgcttatggcagccgaattgagaagctgcttggcgatattggttccgacaagaacgaatcccagtaacagaatagaggagacggcaatgcacacttatgaacaggcgctccaggccggaaagcaatttctgctggagcatgatgattacctggtcgtgtcgcatgtacagccggacggtgacgcagtcagctcgacggtaacggtgggctggctgctgtcatgtctgggtaagacattcacgatgattaatgaaggtgaaatccccgggcgcatgcaatttttgtgggaagcaggcaacattgtaaacatgaccgaacaaccaccgcagcgaaaatataaagctgttatctgtgtggattgtgcagactttgccagagtaggtttgacacgtcattatttcgaagaagatgctgttatcttgaatattgatcatcaccctacaaatgacggttatggtacagtcaacatcattaagtcagatgctgctgctacggctgaaatcttgttcgattttcttaacctgttccaagtaacatgggatcaagatgttgcgacggcagtttatacaggattgcttaccgatacaggtggattccgctatgcgaacaccagcccaaatgtaatgacaacggcctccagactgcttgaacatggcgtggatggaccctatctcgcccagaccttattggagcaggtgactcttccgcaagttcggattttgaatcaggcactatcaagcctgcagatgacagatgatggaaagatagcctgggttgttattacaccagatgatatggtcgcttgtggagcagctaatgaagatcttgaaggggtagtgaactatccgcgcaacattcagggcgtggaagttggtatctttttcaaagtcatcaacgagaatgcagtcaaggtttctttgcgttcagctggtaaaattgatgttgctgcactagcacagacctttggcggaggcgggcatgtgctcgcagccggatgtcgtctggaaggcagacttgatgatattatcgcaaaagtactgaagcaggtgaattcacaatggtaaagccatttgaaggtgtacttccggtatataaaccggcgggatttacttctcatgatgttgtagccaaaatgcgtcgcattctcaaaatgaagcgcattgggcatacgggcacacttgacccacaagttacaggcgttctgccgctctgtcttggacgggcgacacgtgtggtggagtacatgcaggagcttccgaaggaatatctggctacgctcagattgggactgtctactgacacagaggatatgacaggggaagtcatcgagcgggctgaaacgattgtggaagtaacacaggaacaggttcaacaggtgcttgagcagtttctgggcacgatctcacaggtaccacccatgtattctgcggtaaaggtagacggaaaacgtctttatgagcttgctcgtgaaggtaagacggtagagcgtaagagccgtgaggtcacaatctatgagctcgaacttactgggattgagactcagggtgagaccaccgatatatccttccgggccttatgttcaaaaggtacttatattcggacattgtgtgtagacattggccggcaactcggatatccatcgaccatggttcaactggaacgtacgatatcggcaggtatctctgcagatcgttgtcttcgtattgaagaagtggaacaacttatggctgacgggactttggcggaggcgctgattcctgttgacgaggctattgcttcaattccggcccacaaggttggagaagaactgaccaaaggagcactgcaaggtcagaaactgtctgcgcgtcttctggaaccgcctgtggagcaacctggtttgctgcggttgtatgctcaggatggtacgtttctggggatatttgagcgggatgaactaaaaccaacggtgagggcagttaaagtctttttgccggaataaagaggtttcgggcttggagttgtggtgatgctctagcttggcctatctagtgaaatgcaggtgaatgattgtgaaaaccgtaatgctaacctatccgcagacgttacattcgactgagctgagcacactgccccaagtgcttgcgattggtcaattcgacggactgcatctcggacatgcaagtgtcattttatcagctgtccgcattgcgcgggaaacgggcatgcaggcagcggtcatgacctttcatccacatccgaaggaagttatgcgcaaaggggattacgagggttatttaactcccttgagagataaagaagagatcttggcaggaatgggcgttgatgtactctatgtggtggagttcaatgaggatttctcacggttgacgccgcaacaattcgtacacgacttgttgattcctcttcagacacgaacagcggtggtgggttttgacttccgttttggtcacaagggtgcaggggatgaacaacttcttcgtactttgggagaaggagagatgacggtggaaaccgttcctcctttcttgttaaatggtgaaaaagtaagcagttctctcattcgtggcctgttgaagcgtggggagatggatgaggccagtcattggcttggccgaccttacagcatcagaggaaccgtcattcacggggagaagcgtggacgaacgattggatttcctacagccaaccttgaactcacggatcattacgttaccccgtcgaagggtgtttacgctgttcgtgtgcagtatggcgaacaggaactgcgtggggtaatgaatctcggtgtgaaacctacgtttcacgaaagcgggatgaaacctacgtttgaagtgcacctgcttgattttgatggacacttatatgaccaggaactaaaggttgagctcgttcactatattcgtgcagaacgaaagtttgactccattgatgcattaattagccagattcgtgaagatgcattaactgccggccgcctgttatcttaaaggttcaggattaaatgcatgtttacatttactttaactaggcaattatgatatactgtactacgttgtcgattgagacaacattaaccttggcttggttgcttgctctcaccggcggtgacgaggctaatggcgattatattgaaggaggtgaacaggatggcattgactcaagaacgtaaacaacaactgatcgacgagcacaaaactcacgagtccgatacaggatctccagaggtgcaagttgctatccttacggaaaacatcacaagtttgacagaccacttgcgtacgcataagaaagaccaccactcacgtcgtggacttttgaaaatggtaggtcaacgtcgtaagcttttggcttatgtgaaaaacaaagatgttaaacgttacagcgcactgatcgaaaaactcggattgcgtcgttaattatcgtacatgttttcaaaatcaacctggctgttatccgtcattcttttgtctaaaaggacaagcggaacttacagccgggttgttttgtagatgaacatgttgccatatatttgtagatggggctccgtgaggagcttttgttgtgcaggttagcatgttgaaagttccatacatagctaatgaatgcaggacaagcaggaaatactgtgaatatgcagaatccattgaattaggaacgaataaaaggaggggtttcatggaacagcgtgttgaaatgcagcttggtggaagaaaacttacgcttgagaccgggcgtttggccaagcaggctaatgctgccgttaaggtaacatacggggataccgtggtattgtgtaccgtgacagcatcaagtgagccgaaagatctggactttttcccattaacggtgaactatgaagaaagattgtacgccgtaggtaaaatcccgggaggatttattaaacgtgaaggcagaccgagtgagaaagccattctttcaagtcgtctgacagaccgtccaattcgtcctttgttcccggaaggcttccggaatgatgtacaagttttgaatatcgttatgagtgtggatcaggattgcgaaccgcaaatcgctgcaatgattggtacatcggcagcattgagcatttcggatgttccattcagcggaccgattggtggcgtgaaagtgggacgtattgatggcgagttcatcattaacccaacgattgcacagcttgaagtcagtgatattgaactggtcgttgcaggaaccaaagatgccatcatgatggttgaggccgaagcaaacgaagtgccggaagaagtgatgctcgaagcaatcatgtttggacatgatgagatccaaaatattattgctgtaatcgaacaacttgtgcaagttgctggaaaagaaaaaatggctgttaagttgcgtaccgttaatactgaagttaacagcagcgtgcgtgaattcgccagcgctcgtctggtcgaagcggttaaaatcgccgagaagcatgctcgtcaagatgcaatcgatgtagtgaatgacgaaaccgttgctcactttgaagagaaatatattgaaagtccggaattgttcaaagacgtgaaggaagttctgcacgatatcgtcaaagaagaagtgcgtcgtctgatcacgcatgataaagttcgtccggatggacgtggacttgctgaaattcgcccaattgaatgtgatacatctctgctgccacgtgcacatggtacaggactgtttacgcgtgggcaaacgcaagcactcagcgtttgtacacttggtgcactgggtgatgttcagattttggacggaatcagtcttgaagaaacgaaacgattcatgcatcactataacttcccaccattcagcgtaggcgaagcgcgtccattgcgtgctccaggccgtcgcgaaatcggacatggtgctcttggtgagcgcgcgctttccaaagtgattccttccgaaacggatttcccatacacgattcgtttggtatctgaagttcttgaatccaacggctcatcatctcaggcaagtatctgtgccagcactttagctatgatggatgcaggtgtaccaatcaaagctccagttgcgggtgtagctatgggtctgatcaaagatggagatcatgtatccattctgagtgatattcaaggtatggaagatcacctcggtgacatggactttaaagtagctggaacacctgaaggtgtaactgcaatccaaatggacatcaaaattgctggtattaatcgtcaaattttgtctgatgcattggcgcaagccaaagaaggccgtatgcacattttgggcaaaatgaacgaaattttgaaaactccacgtgagcagttatcacaatatgcgcctaaaattacaacgatgcatatcaatccggacaaaatccgtgatgttatcggtgcaggtggtaaaattatcaataaaatcatcgaagaaaccggtgttaaaattgatattgaacaggatggacgtgtctttatcgcttcttccaaccaggagatgaatgataaagccaaagcgatcatcgaaggtattgtgcgcgaagtattggtcggcgagatttatgtcggtaaagtaaaacgcgtagaaaaattcggtgcatttgttgaagtacttccgaacaaagaaggtctggtacacatctcgcaactgtcaactgaacgtgttgccaaagtggaagatgttgtagctatcggtgattccattacggtaaaagtaacggaaattgacccacaaggtcgaatcaacttgtcccgtaaagcagttttgactgctgaagctccggctcaatcctaggataccgaagcgacaggttataaatggatagattgaatgaagagacagaatgtgaatttctggctctttttttaacgtttaaatacgtaaagcaaggatgaaaccatggcttagcattcatatttttgcccttgtcctcatatgatggggacaaagacggcgggaggatggagctgtgggaaaccaatccaaaaagctggcggctgttctggcgggtgtgactgcggtcatattgatcggacaagttggcagtgtacgtacatacattacggagatccgtgatgggccaggtacgaaaaatgcttttgacatgtttaaggaggcaactggagaagatgcgctgttgtctgcgattcgggataaagcggctgaaacgaaaattgctccggtaaatgccagagtggatcgggtatggaaagcgattcctggttataatggcatggagattgatgtggaagcgacataccgtaaggcgctgagtggaacgttgaataccaaaatagcgtatgtctaccgtcagattgaaccggagatccagcttaaggatttgggtgcacatccgatctatcgggggaatgcaaacaaaccgatggtttcttttatgattaatgtggcctgggggaacgaatacatcaaaccaatgctggatacgctcgatgccgagaaagtgaaagctactttttttctggatggaagttggttaagcaaaaatgttgaactggccaaagaaattcagaagcgtgggcatgagatgtccaaccatgcatattctcaccctaatatgagtcgattgagcgcagaacgggccaagctggaaattagcaaaacccaggatctgctccataaaacattgggcgtagagaatcgttggtttgctccgccttccggtgattttaatcagaagaccgttgacattgcttcatccatgggactgcacaccgtgttatggacagtagatactgtggattggcgtaagccaagccccgatgccgttgttgccaaaattgcaaaaaataccgaggctggaacgttaattctaatgcaccctacagctgcttcttcgggagctttaaagggcatgattcaatccatacgggccaaaggtttggtgctcggaacagtaagtgagacgctgtcttcggaacgtgtaaatacgtctgcggttgagtgaacgttgtttttttgttaatatcaaacagttggaaccaaatgtcgatttcaattttaaggttgagatcaaggcaattatagagatgtaggagggccaaccatgaaaaaaattcagctgggcaatggcctcagagttgtcatggaacagataccgacctgccgttctgtgtctttcggaatatgggtcaagacaggttcgcgcaatgagcaacctgcaagtaacggagtatcacattttattgaacacatgttattcaagggaacagatcgttatgatgccaaggcgattgcggagcagttcgatgcgattggcggtaacgtgaacgcattcacttccaaagaatacacgtgttattatgctaaagtattggatgaacatttgccgattgcggttgatgtattgtctgatatgtttttccgctccaaaatggatgatggtgaattgatcaaggagaaaaacgtcattctggaagaaatctcgatgtatgaagatacgcctgatgatatggttcatgatctgatggccttggccgcctatggtgagcatccactcgcatacccgatcctgggtacggaagaacgcctcaaagcgatggattccagccatctgcgtgcatatatgaaggagcactacacgattgagaacacggtcattagtatcgcgggtaatattgatgacagtgtaatcgatctgatggagaagcattttggtgcttttgatgtaaatggagtatcggaagcagtcacgatgccagccttccaaagcggacagctctttcacaaaaagaaaacggaacagaatcatatctgtatttcgttcccgggctgtaaaatcggagatccgctgcaattcgctatggttgttctgaataacgccattggtggaggcatgagctccaggctgttccaggaaattcgtgagaaacggggtcttgcgtactccgtgtattcctatcatagctctcatgcggacagcggacttttcacgatatacgcaggtacagcaccgaaacagaccaaagaagtgctcgatctgaccaaagaggttctacgcgacctggctgttaacggcttgtccgaagatgaacttcgtaaaggaaaagaacagctgaaaggcagcttgattctaagcttggaaagcacaggcagtcgcatgaatcgtctgggtaaaaacgagctcatgctgggcagacaccatacactggatgagatgattgccaaaattgagcaagttaccatggacgatattaacgcggtactagatctgatgtttgctgaaccttttgcacttgctatggttggcgcttcagataagacgatcgctggattgagaagggatgattttgttgcattacgttcaaatacagaaactgccgggcaatgaagatattaaactgcctcaaaaaatgtcggagctggcatccggctttgatgtagtagctgcacttcaggaagacgttgtattgcagccgggtcagcgtacgctgattcctaccggacttgcgatggcaatgccagctggattggaagcacagatccgtcctcggagcggactggctttcaaacatggtattacctgcctcaatacaccggggaccattgatgcggattatcgcggagaagttaaagttctgttgattaatctgggtcaggaaccgttcacgattgtacggggagagcgcatcgcacagatcgtcttccagaccgtgcctgcggttgaattgacggaagtgaatgaactttcggaaacggtacgtggtgaaggtggattcggtcatactgggaaataagcagcgtaaatatacctattctttagagtcgtccctgacaggggcggctcttttttacatttgagaaacggacggtggaatgcaattattgttttcacccccctgtgggcccctgcatacgataaggcatacatgtggtgaaaggagtgacgtcccgatgctgaccggagtccggattgtagtcctgggcggagatgcgcggcagcttgaagtcattcaaaagtgcgctgagctggatgcaacggtaagtgtggtgggtttcgataaaatagagcgttccattccagggatcgagcaccaggaactggaggatgaagtgtttgcttccgcagatgtactcgtactgcctgttgtcggttgcgatgagcagggaaaagtaagtacttcattcagtgacacaccgatctatttgaaaaaagaacatattgcagcattaccagagcattgtattgtgttcacgggtatggcaaagccgttcttgcgcgaactttgtcttgaaaatgggctgcgacttgttgaagtacttgatcgtgatgatattgcactttataactctattccaacagctgagggagccatcgccatagctattcgggagacggacttcacaatccatggttcggaatgcattgtgcttggcattggtcgaacaggattcacaatggccaaaacactgcagggacttggagcaaatgtacgggtgggaatcaggcgggaagaggatgttgcccgcgctacaataatgggctggaagcctttcatgacaacggatttggccgctcagaccggggaagttgacttgctttttaatacgataccgactatgataatcacagcacaaatcctgtccagaatgccgcaaaaggctgtcattatcgacctcgcatccgctcctggcggctgtgatttcaggtatgccgacaaacgcggtattaaagcgctacttgcgccaggcctccccggcattgttgctcccaaaacggctggcggcattattgccgacgcgttgatccgtttgcttttggaagaacagaacgcacgggaggttaaatcatgaactggcagggaaaaacggtaggttatgcaattacgggttctcattgtacgtttgaagaggttatgccggtaattagccgcttcgtagctgaaggtgccaacgtcattccgattatttcgaattcggttctgacgacggatacacgctttggtacggcgcaaaattggcaaaaacagttgaaagatataacaggtaatgatatcatttctacaattgttgaagcggagccattagggccttccaagctgcttgatgtgctggttattgctccatgcacagggaatacaacaagcaagctggctaatgcgatgaccgacagtccagtgctaatggcagccaaagcgcagatgcgcaatcagcgtccacttgtgctcgcgatttccacgaatgacggtctgggcttgaatgctgcgaatatcgccaaattgcttgtggctaaatacttgtattttgtgccatttgggcaagacgatccagtgaaaaaaccaaactcgttagtcgccaaaatggaattgattccagaggcttgctggagtgctcttgagggcaaacagttgcagccgatgattgtggagcgttcttcacaggcttgatggaacaatgatttggtgacaacgtttatgcgcttggagaaatgaagaagggttcgagagacaaagaaaatcatgggggacaatatgctggattgaacagctactatgtccacgttcctgtctataaggcattcctgcttgcgggcagtacaggttaagcaagcgggagaggtctattgtgaatgtatgcatcatgacctcgataacaaccgcgacctttgatttgcgattgtcccagacaattacagaaaataaggagcggcatggaatgccgtataaaatgctgaaattatcgcatcagaacgctccctagagtgatccatttgttgatttgacccgtgtccagtcttcttgcgtacacaaatggaggaataaagatgcgtatcatggtacagaaattcggaggcacgtctctctccactgttcaggcgagagagcatgtgctccgtcatgttaaacgtgaacttgaagcaggattgagtctggtcatcgttgtgtctgcgatggggcgccgcggcgagccatatgcgaccgatacgttgctggactgggctgcacagaacggaaacgcactatccgcacgcgaaaaggatttactgctgtgctgtggtgaaatcatatcggcgacaacgttgagcagtttactcgaacatgaaggcattccaactacagtgctgaccggtgcacaagcaggttttgtgacggacgacaatttcgggaatgcccggatattggatgtccgtcctgttcgtgtgttggagcagcttcagcttggccgtgtcgttgttgtaaccggattccaggggcagacagagaacggagacttcacgacattgggtcgtgggggaagcgatacgtctgctacagctctcggtgcagcattacgtgctgaaatggtggatatctacacagatgtgaacggaatactcaccgctgatccgcgaattgttgaggatgcacgtccactgactgttgtgagttatgcagagatctgtaacatggcccaccacggggccaaggtaatccatccacgtgcggttgagattgcgatgcaatcccagattccagtgcgggtaagatctacttttgcagacacggaaggaacgctggttacgcatccggaaggattccaggatgtgcagacaggcattgttgaccgttatgtaacaggcatcgcctacgtgagcaatgtaacgcaaattacggtggatgtgcctggtggtggtgcagatcgattgcaactcaaagtgtttaaaaccatggctgagaattcaatcagcgttgattttattaatgttaccccctcgggagttgtctatacggtttttgacagtgattccgagaaagccatacaggtattgcaggagataggtctcaagccacaaagcctgtccggttgtgccaaagtgtccgtcattggcggaggcattaatggtgtacctggaatcatggctcgaatcgtggagtccttgacactggcagacattcagatcctgcaatcggcagattcgaatacaacgatctgggtactcgtaaaaaaagaagatatggttcaggccctgagggcacttcacgcctcattcgaacttcatttgtaaataactgaagttagaggagccaaacctgttttgaaggaggaatcgaattggactttggaagattgattacagcaatggtcactccgttcaatgaacaaggagagattcattgggaggaaacggcacgtctaatcgactatctaattgtagatcaaaagtcggagacgcttgtggtttctggaacaacaggggagtctccaacacttagtgatactgagaaagttcaattattcgaatttgcagtgaaacatgcggccggtcggtgcaaaattatagccggaacgggaagcaataatacggcacattccatccatttgacacaggaagctgaacgtgccggagtggatggcattttgttggttgttccgtattacaacaaacctagccaagaaggtttgtttaaacattttgaagcgattgcaggctccaccaagctgccaattatgctctacaacgtgcctggacgtacagtaaccagcctgtcagcagagacaacgcttcgtcttgcacagattcctaacatcgtcgctacgaaggaatgtgcgtctatggagcaggttacgctgattgcagcaagtgctccagaaaattttagagtttattccggtgatgatgcttcaggcttaccagcgattgcggttggagcacatggaattgtcagcgtggccagtcatgtcgtaggggcagaaatgaagaaaatgattgacgccttctatggcggagcacctcttcaggctgctcagattcatcagcagttgttcccggtattcaaaggcctgtttgagtgtccacagcctctaccaaaccccgtagcggtgaaatatgcgctgacattgcgtggtctagacgttggttccgtacggttgccccttattccgccaacggaagaggagcaggtttatatcaaaggtttgcttaatttgtaatcattttggttgtatatggactattttattaatcatggaatatccttcagatcagcaaaagaaccgctcctcttcgtagaggctgcggttcttttttttacgagtaatgtgaggtttcttttccactgctaaggggaaacctacaggttaacgagagagtgacttgttttttttgtttttaatcatgtataatgatgtcaagtgactgggtgcggtatttttttgaaattgaaagcgacatcgtttggtggtgtagctttgcggtgaaaaaggaaggaacggctaagagggaatttcaactccaacttgttggtcaaagggaataacttcgaagaacttcttccaaatatcgtgaataaaggtgttcttttgcattcatcccgataggtgggtatgtgatgtatggactacttttcttaacttacaataaataataaggtacgacgtccaactaccataggaggtttagattcatttgtctaagaaaaataataacgataaactgatgatttttgctttgggcggcgtaggcgagattggtaaaaatatgtacgtcatccaatacgccaacgacattgtagtcgtagatgctggtcttaaattcccggaagaagatatgcttggtattgatattgtcatccctgacatttcttacctgactgagaaccgtgacaaagtaagaggaatcatccttactcacggacatgaggatcacattggtggtctgccatatgttctcaaacatctgaatgttcctgtatacggaacaagacttacgcttggacttgtagaaaacaagttgaaagaagcgaatttgctgggtgatacaaaacgtattctgattgatgctgattccgagatccaacttggatctgttctgaaagcatcgttcttcgctactaaccatagtattccggattctgttggtgtatgtgtcgaaacaccggaaggtgcagttgttcacacaggtgacttcaaattcgaccatactccagtcaatggtcaatatgcagatcttcagcgtatggcacagatcggaacaaatggcgtgttagcgctgttgtccgacagtacgaacgctgagaaacctggattcacaccatcggagaaaaatgtgggtatcgtgctggaagatatcttccgtaaagcaagtcaacgtgttgttgtagcgacatttgcttccaacgtacaccgtatccaacaggtgatcaatgcagcagaagtgactggacgtaaagttgcagttatcggacgcagcatggtgaacgtggttggtattgcttcagaactgggttatcttgagattccggatggcatgatcattgaacctgaagaagtaggcaagatggcagctgatcgtgtcgtgattctctgcacaggaagtcaaggagagccaatgtcagcactgacacgtatggctcgttccacacaccgtaaagtggacatcctgccaggtgacaccgtcattatcgcagcaactccggttccaggtaatgagaaatatgtaggccgtacgattgatgaactgttccgtctgggtgctaacgtgcattacagcggtgctaacagtggcgtccacgtatctggtcacggtagccaggaagagctgaaactgatgctcaacctgatgaaaccgaaattcttcttgccaattcacggtgaattccgtatgcagcgtcgccacgcggttcttgctgaatctgtaggggtagaacctgagaacattttcatcacggatatcggtgaagtgattgaaattcaaggtggagcagcacgtagagcaggtaaagttactgcaggtaatgtgttgatcgacggcttgggtgtaggcgatgtgggtaacattgtacttcgtgaccgcaaattgttgtcacaagatggtatccttgttgttgtggtaacactgagcaaacaggatggaaaaattgtttccggtcctgacatcatctctcgcggatttgtgtatgtacgtgaatcggaaggactactggatgaggccaaccggatcgttagcagcacattgcagaagttgatgagtgagaacgttaacgagtgggcttcactcaaaacaaatgttaaagatgcactgggacgcttcctgtatgagcaaactcgtcgtagaccgatgattttgccaatcattatggaagtttaaaataggctaaacaaaaacatatattcaggcacacagtcgccccttctctacgagtaatattggacggttcctcgtagagaaggggctttttttgcgttttcaggaagatctgcgataagtcaatatgtgaagcaatttgatgtagcgggtataaggcggttggaaaaatccccatactaaggaaatacattaaatgtttctggagaaggggattattgaaatgaatgaacgcatgaatgacaagcaggcgtcaagatccaatcaaccggaagttgaagcgccggaaattccgattcaggaggaaaaggccatctcttccgtgacagagactattcagcaatttgggcagacacagtcgccagcaggtgaatcgaacatcttctgtatgaccattattggacaggtcgaagggcatttgattttgccgccacaaaacaaaacaacaaagtatgagcatatcattccacagctggtggccgcagaacagaatcagcgtattgaaggtattctgatcattttgaacacggtaggtggagatgtagaggcgggtctagccattgcagagatgattgcttctctgagcaaacctacggtgactgtggtcattggaggcgggcatagcattggagtaccgattgctgtagcttcaacatattccctgattgccggaagtgcaacgatgacgatccatccgattcggatgaacggccttgtcattggtgtacctcaaacgtttgagtatatggagaaaatgcaggaacgagttgttcggttcgtgacttctcattcgaatatctctgaagagatgttcaaagaactaatgtttaagactggtgagttgaatcgggatattggtacagctgtaggaagcgcagatgcagtgaaacatggattaatggatgcagtgggcgggattggacaggctattgctcagttaaatcagctcataggagacaagagacagactctgcaagcgggaggttatacccaatgacattatataccgtgatgcccccggaacaactctggtcgggaatgtggaaagatggcgaagatacaaaggagatcaaaatgaatggtttattgatgcaggtgagacctgttaatgacaatgaagccgttattgtacgtttgctggattgtccgcttgaagcctatctcaatcctgccaatatgccgggttcgaccattccgatttcaggtaacttgggatcagcataacgcgacgaattcagacaaattgagcagaaaaagaacatatgtacggaatatatttgtatggtataatattcttctgggggtgacctgattttggccagaagaaaaaagaggaaaaaaaagggcgctggttttagcggcgttttaaaatatgaaatttacgggattgtgcttattacccttgctgtcatagcattatcgggtgaagccaccgttggacgttcgctttccaagatgttcggactgatgcttggtaagttttattttgcgattccacttgttggcatttattatggtctcatggtgatgattcaccggaaatggccgagtggctggaccacacgcaagacaggacttgttttgctggtctttgccttaaccttgatgagtactgtctctgcaatgcaccagaagctcattccggttggtgcgcttgagcctggtgctgtgattacgcaggtacataatgatatgcaaaccgagttgctaacccctgctgtgccaggtgagagggactccatgcttaacaaggacatcagcggtggttatctcggagctgggcaatttgctcttttcctgtggctgttcggcagtcttggggcgagactcatcatgattgtcatgtttatcatcagttttatgctgattacgagtctatcttatgtggatttgatacgaatattccgaacaaagatctgggatgccgggagttcgatgtacaaaaagctggagtcgagaccgtctgcacgttctgcttcaacttctgatgccaggaagaaaggtaacgcccgtaaagtggtacctgttcctgttgaagatgacgaagacgagtatgaggatgaattagaggaacagcatctgccaaaacgaaactcgcccatattcttccaactttttggaaaatggggagctaaacgggaacaggcgacatcaggacgtgaaatggatgaggtcgattcggcagaaacagaacagattgtgtaccgcgccgaacaagatcacaatctagaggcgtggcaggatgcaaccgaagacgtaactaacaaatcagcttcagcacgtgttcctgttcaggctaaacctaattcagcgccgatcattcgagacttttttgagcacgtcagaacagaagaggcaagcattgaagatgatctggacgatgcttatcctttcccggataatctggccgatccaaacgtagtacaacagggcgagcataccattaaaataacggatgaactggtagagacagagtggtctgcatccgatgcaggtacaaacgggatgaatgctgtggatgagattcagagtggagaagaagtacctaatgatgcaatgcagggaacagatactccaactcctgaagggcaggacacacaaccgttgaaaccaccaccgccacctcctaagccgtacaagctaccatcattccgtctacttgccaagccaaacaatgggggcaaggcgggtgaccagaaggattatatgcaaacagcacgtaagctggaagccacactggaaagcttcggtgttcgtgccaaagtacttgaagtggttcgtggtcctgccgttacaagatatgaaattcaacctgacattggtgtcaaggtcagcagaattgtcagcctaactgatgatatcgcgttggctctggcggcaaaagatattcggatggaagcaccgattcccggaaagtctgctattggtatcgaagtacctaatggtgaagtatcggttgtaacgatgcgtgaagtaatggagacagcaacgttccaggaggcagaatccaaagtgaccattgcatttggccgagatatctcgggacagacgattattggtaacttggctcgtatgccccatttgctggttgcgggtgctacaggttccggtaagtcggtgtgtattaacggaatcattaccagcatattgtacaaagccaagccggatgaagtgaagttcctgatggtcgatcccaagatggttgagttgaacgtatataacgggattccccatttgctggcaccggtagtaactgatcctaagagagcgtcacttgctctcaaaaagattgtggttgagatggagaaacgatatgaactgttctccaaatcaggcactcgtaacgttgaaggttacaataatctgatgaaagataatcctgcggctgttctgccttatattgttgtcattgtggatgagcttgcagatctcatgatggttgcagccggagatgttgaagatgcgattgcgcggcttgcccagatggctcgtgcagccggtatccatctgattattgctacacagcggccttctgtggatgttattactggcgtaatcaaagccaacataccttctcgtatcgccttcggtgtatcctcacaggtggattctcgaaccattctggatatgggtggggccgagaaactgttgggtcgcggagacatgttattcatgccaatgggcgcatcgaaaccggttcgtgtacaaggtgcttttatgagtgatgaagaagtggaaaatattgtgaattatgtacgtggtcaaggtgaagcacagtatgatgagtcccttgtacctgaggtggacgactctatccaggctgaagatgaagtacaggacgagttatacgaaaaggcagtgcagattattctggaggccaagcaagcgtctgtttctctgctacaacgtcgaatgcgagtaggatacacccgtgccgcacgtttgattgactccatggaatcccggggcgtgattggtccttacgagggtagcaaaccacgggaagtgttggtctcgcttgaagagtaccaacaaaacaaaataagctcgtagcttgtaatgcacatgaatattcaggcgattcgagccctcaaccttaatggttgggggcttttttcatacaatttgactgaagttttaccatgatgtccaatgatcggatgatttggtgcataggaagcaagcaggcttgtcataataaccttagcgattctgttaatcccacaagagaaaggtagagcacagtcgatgcgaaaaatgaacatatggcttttcactgctattttgctgatgtccgcattgggaatccgctatttgcttcctgagaatgcagcaaccgaaagttcgaatcaaagcacaccacaagttgaagagaaagccttgcctactttcagcagcaacgctgtgaaatatggaagttacggtcaggatgtgtatgagcttcaaggccggctcaagtatttgggattttacaatggtaaaatcgatagcaattttggcagcagcacgctgaaatccgtcaaatggtttcaatccgaatttggtatgaaagccgatggtgtcgttggagctgaaaccaaactgaaattgtataatgcttcaaccaaatggtcgccaacggaaacgccattgcacaaggaaaaaacttcaggtggaagtgatagtagtaacaatacggcagataaagagcaagataatatgggatctgccaatgcactcggtctctcagagaatgaactcaaaattatggctaacgcagtatatggtgaggcccgtggggaaccgtttgaaggtcaagtcgcagtagcggcagtaattatgaatcgcgtgaaatcaccaagctttcctaatacgccttcaggcgtgatctttcaaccaggtgcatttacggctgtagcggacggacagatctatttggaaccaaacgcacaagccaaaaaggcagttgagcaggccctgaatggatgggatccgtccggtggatgtctctattattttaacccgaagacagcaacatccaaatggatctggacccgcccacaagtgaaaacaatcggacagcatatcttttgtatgtgatgatgttggaagcaaccagaaggcgtgacttcggttgcttcttgccttttgaatgggttaaaatggttgttacgtttagcttaatatgattgcatgataaatgacgccgtaaaggggttttgacatttgaatacatcaggattcgaacgaggtagcaagagagagtttcgtatacatgtgcttccgactaaacgtttcaaaacgtttgctatatcgctatatgcaggagttcccttacgggaagatacagtaaccaaagtagcactgacaccttttgttctgcgacgcggcacggagtcctatccggaaacaacgcaatttcgtgagcaactggagcatctgtatggagcaggttttggttttgacgtctataaacgcggggattaccagattgtacagttccgaatggataccattaatgattcctttgttggaggggatgaacagctactggatcgttcatttgccttcctaggagaggttcttacacgacctgcacaggagaatggacatttcaggacgtcttatgtacaagcagagcgagagactgttcgtaaaaagctggagtccatcgtgaacgataaaatgcgctatgccgctgaacgcagtatcgaggaaatgtgcaagaacgagccgtaccgtcttcatccactgggtgagcgaaaggatctgcctgggatcgagcccgacacactgactgcgtcttatcaggagtggctgcagcaggcgagtatggatctgtacgtggtaggggatacgacactggaggaggtcgagaaccttgttcagcgtcatttcaatgtagatcgaacgtcctcctctgattaccagacacaggcagcggttcgaggagataaggaagtggagaccgttgttgagcgactgaatgtgagtcagggaaaactcaatatgggactccgtacatctatcacttatggagatccacagtatgccgcagcactaatgtacaacgggattctcggtggttatcctcattccaaactgtttgtcaatgttcgtgaaaaagaaagcctggcgtattacgcgtcttcgcgttatgacggacataagggcattgcaacgattcaatccgggattgaaatccctaattatgagaaggctgtcaccattatcaagcagcagctggaagaaatgaaaagcggtacaatcagtgatctggaaatgtctcagaccaaagcaatgatccgtaacctgcttaaggaaatgcaggattctgcttttgagatgatcgcttatgacttcaatcgacagttgtctggcaaagaaagaacggctgaagaactgttggctcaggtagaacatattagcaaggaagatgtacgtgaggcggcagaacaattccgtctggatacgatttatttcttgcgggacgagaaggaggaataatcggtggagagcattcggtatgagcatttgcaggagacactatattacgaagtaatggataacggactgcatgtctatattttgcctaaaccggggttccagaaaacgtatgctacgtttgcaaccaagtatggatcggtggataatcattttcaggttgaaggacaggaagaagtgaaggttccggatgggattgctcatttcctggagcataaaatgtttgaagaaccaacaggcgatatttttgcaacatttgcgtctcacggtgcctcagctaatgcgtttacgagctttgatcagacggtttatttgttttcagcgactgaatatgtgaatgaaaatatacaaacattagtcaactttgtgcaaaatccttacttcacggatcaaaatgtggaaaaggaaaaaggcattattggacaggaaattgacatgtatgctgataatccggattggcgtgtttattttggattgatcgaagccatgtatcagaaacatccggtgcatatcgatattgcaggaacggtggaatccatccgtacgattaccaaagagatgttatatgagtgttataacaccttctatcacccgagtaatatgctcttgtttgtggtgggtggtgtagatccacaagaagtcattgatatggttcgatcgaaccaggagcagaaggattataagccacaggggagcattcaacgtttcttcgaaccggagcctgagcaggtaggagaagccagacgggaagcgaaactggctgtttcactgcccaaatgtctgtttggattcaaggagacggacgttggacttaccggggaacaattgttacggcgagatatgacaacgcagctgatgatggacctcttgtttggctcaagcacacgattatttcagaagctctacgatgaagatctgatctcggacagctttggacatgagtataacagttcgccgcaatatgctttttcagccattggtggtgatacaaaagacccggatcaactgctcgcgcgtatacgtgaagaagtggatgccattgtagaaaaagggttcgattccacggattttgaacgtgcacgcaaaaagaaaataggcggatatttgcgtatgctcaattctccggagaacattgcgcatgaatttacacgtcagcaattccgtggcggtgattttttcaatatgctgccgctctatgaatcgattacactggaagatgtaaatctcagactgagagagcatattcggtgggatcatctggctgtatcgctagtcgtgagtccttgatatggagaggggaacgggacaattgaaggcaatcggggaaatgactgtactggtaactggcgcaagcggtggcatcggagcggctatcgcagaacgctttgccagagtgggaatgaatgttgttatacactatatgaaatcgcatgaagcagcgaatgaagccgccagacggtgcatggaacaaggcagcggaaaaatcatgaccgtgtctgcggatcttcgcagccgggaacagattgagcgtatgcgtgagaagctggagtcgcacaatctcatgccagatatccttgtgaacaatgcaggaatctcgcactatgggatgttggctgatgttacagaggagatctgggatgaagtgatggcgattaacctcaaaggcacgtttatgtgtacacaggaaatgatgcctcacatgatctcccaaaggtacggccggatcattaatgtatcgtcgatctgggggctgtctggtgcttcttgtgaggtgctgtattccacaaccaagggtggggtgaatgcattcaccaaagcgcttgcgaaagaactcgcgccttccggagtaaccgtaaatgccgttgctcctggtgcagttcagacatccatgctgagccatctggatcagagtgaactgaagatgctggaagaggaaattccggcaggaagacttgctcaacctgatgaaatctcatcattggtttattttttggctctccctgaatcgggttatatcaatgggcagatcatcagtccaaatggcggttggttaacgtaaaaaagcaagaaaacttgactggctgtgaatgaaccaggtgaaggttgctgagaagcagtcgtcttccggattattttcaaaatgctcgtatataaaatgcttcgaaagcacatattacaactgttgattttaaatctcatgcgtcatctaaggaggatttatcatgtcaacagaaaaaacagtgctctccagttttgacacatggaagaagttcctgggtgaccgcgtactgcaagcagagaagatggggatgagtgaagaaaccatcaacaaacttgcgtatgaaatcggcgacttccttgatgagaaagtcgatccggcgaaccattccaaccgggcattgaaagagttatgggatgtcggcgatgctgatgagcgtcgtacgattgcgtgcctgatggtcaaattggccaaacaaaacgcataagattacagatgaagagctcccgcaagggggcttttctctaatgattacaaacggattacagagctgttcttgtaattcattttcattttatatatcattaacgtgacccatttttagaagatgtctcagattgttgtccagtggatatgttctgttgctgtcgaataatggggaataatgcattacggggtgttgaaatggaatctaaacaatggtacatggaatataaaatacataagaacagacccggtttgttaggcgatattgcctctatgctggggatgcttgaagtgaatatattgaccattaacggtgttgaaggcaaaactcgaggcatgctgcttgaatcggatgatgatgaaaaaatccgtttgcttggtgaaatgcttggcaaagtaaacagcatcaccgtatcggctttgcggcaacctaaattggtggatattttggccgtacgtcatggcagatacattgaccgtgactcggatgatcgcaagacatttcgtttcacacgagatgaacttgggttacttgtggactttttgggtgaagtatttaagagggaaggcaatcaggtcatcggtttgcgcggaatgcctcgtgttggcaaaacggagtctattattgcgggcagcgtatgtgcaatgaagcgatggacgtttgtttcctccacacttctccgtcagacgataaggagtcaaatgtccgaagacgaattgaacccaaacaatgtcttcatcattgacggaattgtaagtacgattcgttccagtgagcggcattacaacctgttgcaggatattatgtccatgcctagcactaaagttattgaacatccggatatttttgtacaggaatccgaatatgattttaatgattttgatattattattgaattgcgtaacattcccaatgaagagattatttatgatacgtttacggctagctacaccgatgaattgtaaggaaccgtacggaatcatggaatagattagcaacaactcaagagataaacataaggaggagatggcatgtctgaactgggtcagcagttaagggaggcccggctgcaaaaagggatgagtcttgacgatgtacaggaaatgacaaaaattcgcaagaggtatctggaggccatagaagcaggagactataaagtgctgccgggtagcttctatgtgcgtgctttcatcaaaacctatgcggagaccgtgggactgaaccctgatgagctgctggagggacacaaaaaagacgtacccgaagaagagacggaagcaacgatggaaccggttattcagaagcgttccagccgtccggttgagcgtagtaatcggtggatgtctgtcgcgttgatgtggacattccctgttttgatcgtagtactgttgtatgtatacgtggtgtataacaatggtgatgaatcagataatccgggtcttgatcaggtcaaaattacagacagtcaacaacaacctgaggataaaccagatccacctgccgacaacggacaggcatctaatccgcctgcgacagattcaggtactgacggtactggtgagggcgacgctgggggtaatggtggcggtacagacactgaaggacagacggacggtcaaactgatggccaaacggacggacagacggatgaaactgaggaaaaaccaactgacaattcaccgtctaatgtgactgttgcagaagatgggaaatcagggaatattacgaactttaaagttaacggtagtgcagggcaacctgtaacggttacgatcaaagcaacaggtcatagctggctggaagtgtataaaggcgaaaactccagtggagagaagttggagtatggtaacacagccgaaggtgacagctatacctttgagcttgatagtacaggcatgtatattaagtccggttacgctgcagcgaccacgattgaggttggcgggcaggttgtaacggatggcaaggcgaccaatcggatccgtttgaagcttggtgaagatagtagtggcactccttcttccacaggtgttgaaaatggatcaacggacggtacagggggtaccacgggtagcgaataaccgggtcaactgcaggagacaataatcgtgtcttaacttgcagttaacttttggtgaagtgaggtggatggctgtgacagtcagctggatcgtaacaggtttagggatcattgtcagcctcctaggttattacctgactccaagtgcttggggttacggaatattgggttttggacttgcacatgtacttttgggtgtgctcgatatgttcagacagcccaaccgcagccgctattaggttggaagctaaaccagcaagcatttttggcagccacttgaagtggaagccaaaaatgcttttttctttgtgtaaaacagcttgaaattagacttttgcttaaggtatcctctataatgttacagaacatacgattaactgaaagggtgactggtttgagctcagaaaattcatttgatatcgtgtccaaaatggacttgcaagaactgacaaatgccgttacacaaaccgagaaagaaattggcgctcgttatgacttcaagggcagcaagagcagcctgaagctggataaggatgcgttaacgatcgtatctgatgatgagaccaaactcaaggctgtcattgaagtgctgcaatccaaaatggcgaagcgtggtctaccattgaaaaacattgattacgcaaaggtagagccagcgtcttctggtacagtccgccagcgtttgaattttaaacaggggattgatcaggacatcgccaagaaaatcaatatcctgattcgggattccaagatgaaggtgaagagtcagattcagggagatcaacttcgggtaactggtaagagtaaaaatgatttgcaagctgtcatgcagttgctaaatggtgctaacctgcctctggatttgcaatatacaaatttcaagtaataaggcctttttgtagcaaaagtgttttttgacacggtattgggcgtatattatactaagtgtgcattgctggcagtcaagcatcaagtccagtcctcatcgtttgctgactttgtgaaaagcagtacatcttctggaagtcaccggaacgtttaaagcgttttgcttttgagcggttgactttattttttgcgtttctacatagtgggatcatgttaatatggattgacattgaaactgtacatttcatgttccggatgatgataacgggattatgatgattgtttggagtaatggaggatatgagggagggcgtcttgtgaatttacccaaccggattacgcttgcacgaatttgcttaatcccttttttgatggtgttcctgctcgtggattttccattttatccagagccgttgcagcttggaagcttgtcgcttccgtataatcaactgattgctgctgttatttttatcatcgccgcaagcacagatggaattgacggataccttgcgcggaaaaataacatggttaccaatctggggaaactgctcgatccactcgcagacaagttgctggttactgcagttttgatctcgcttgtggagatgggcaagctggattcctggattgcagttgtgattattagtcgtgaattcgcagttaccggcttgcgtcaaattgcattgctggatggttcggttgttgccgctagtgcttggggcaagctgaagactgtagtgcagattgtggcgattgtgctgttgctgttgaacaatttcccgttttcatacacgggtattcacgtcgatattatcgcggtatgggcagcagcgcttattaccatctggtcgggtatcgattactttatcaaaaacaaaaatttgcttcatttaacaaaagcataatggtttgttcttaaatgggtaatcatgaaggaagcattgggtcaggggcaataggaaattatcctattgccctttgatcactcaccacgtgtacaggaggatgctcaatgaaggcagaaatcattgcagttggcacagagctactgcttggacaaatcgtcaataccaatgccagatacctatcccgtgaattggctgcgatggggatcgatgtatatttccaaacggtggttggggataacctgaaccgacttagtgaagctattcgcattgcgcagagccgtgcagacgttattttattttccggtggcatcggacctacacaagatgatctgaccaaggatgcgctcgcagctgttcttaaccggaagctgcatacagatcgaatggcaatggacaaaattgagagctttttcagagatcgtaatgtggatatgacagagaataaccgacgtcaggcgatcgttattgatggcggaacacctctggccaatgaaacgggcctcgcggcaggaaatgcgatttctgacaatgacaaatattatgttgtgatgcctggaccacctaaagagttgattccaatgtttgaacaggaagtcaaaccttggctgttccagcatgtactcacagaagagatgccgatctattcccgaatgctcaaattcgcaggtattggtgaatctgctctggaagatcgacttctggatctgattgacgcgcagacagaccctacgattgctccttacgcgagcgaaggcgaagttacggtacgtgtctccacaaaggctgagagtgagggagaggcgaagctgaagctggatgcgatggaagttcagattcgggagcgtttgacagaacatctctacgcgaacgaggatgtgcctatagagtacacgattgtaactatgatgtctgacatggggctgacgctcagcgctgctgagagctgtacaggagggcttgtcatgcaaagtctgacctctgtacccggaagtgcgtcaatgctcaaaggtggaattgtttgttactccaatgaaattaaagaaaagttgctgaatgtgcctcatgattatctggaaggtgaagatgcacctggggcggtaagtccagaggttgcaaaagtgcttgctgagcagatccgcatgattggcgatgctgattttggcttggctgttaccggtgtagctggaccgggatattcggaacgcaaaccacccggacttgtcttcatcgctcttgctgaacgtggaaaagagacggaaattcatgagctgcgtattaatggtaatcgcgagacggttcgcattcgttcagccaaagcgattctctatcgcttatggcaaaaacttgtggcgatggattgattagttaatagcttcgattgcatttacagttccaagcaagtataattaaggaagacggaagaaccgtagaattaggctttacagccttgtttacggttcttttttctgtttaatggaaagtttccttgaggaagaggcgcctcggcctttacaaaaaaaacgaatgtatgttcgaaaaaaagcttggcaaacgtgttaaaacaaggtatcattatcttataaacagtaaagggtgtgagcttattgtcagaccgtcgtgccgcgcttgatatggcgctccgtcaaatagagaagcaatttggtaaaggatccatcatgaaactgggtgagtccactcatatgaatgtggaaattattcccagtggttccttggctttggatattgcattaggaacaggcggcttgcctaaaggccgtattgttgaaatatatggacctgaatcctctggtaaaacaaccgtagcattgcatgctatcgctgaagtacaaagagcgggtggacaagctgcatttatcgatgccgagcatgctcttgacccacagtatgcaagcaaacttggtgttaatattgatgaattgcttctgtctcagccagatacgggtgagcaagggctggaaattgcagaagctcttgtacgcagtggtgcagtagatatcgtcgttattgactctgtagccgcattggttccaaaagcagagattgaaggcgaaatgggcgattcacacgttggtttgcaagcgcgtttgatgtctcaggcgctgcgtaaactgtctggtgcaatcagcaaatccaaaacaatcgcaatcttcattaaccagcttcgtgagaaagtcggcgttatgtttggtaacccggaaacaacacctggtggtcgtgctctgaagttttattccacagtacgtctggatgtgcgtcgtattgagagtatcaaatcaggcaatgacatgattggtaaccgtactcgtattaaagttgtgaaaaacaaagtggcacctccgtttaaacaagcggaagtggatatcatgtatggcgagggtatctcgagagaaggcagtatcattgacattggtacagagctggacatcgttaataaaagtggtgcttggtactcctacgaaggcgagcgtttaggacaaggccgtgagaacgcaaagcagttcatgaaagagcataaagatattgctgacatcattgaacaaaaaattcgtgtagccagtaacttggttactgcagttcctgcgccaactagtgaagagcaacaaaaagaagcagcagaagaacaagaactgtttgaaatcaacgagtaatctctcaaaacctcccttgtagggaggaccctgagggtgttccccactggactccgtaaacttatctgattgagcttggatcaatctggataatggattgtagtgggagtactcgtgctgtctaacagcccctgtcccaatggacaggggctgttagcacgctaactgtggagtaaaggccgggtagagttcccggtcttttgtattattggtgttcttcgtcttatctgaaggtgtgtttggcgtagtcagaatgaaaatgttatgaaaggggagaccagaatggatcaacatgacgaggatttatatgaagaagcagaacaggatggcctatcccaatttccggacaacgaagaacttattattacacgtgtagaacgaacgaagagcaggcaagctcgttatcgaatcacttttggcatccactccattacggttcttgaagatgtgatgattaaatacaggatgactcaaggtaatacgtttatgaagaaggatctggaagatatcattctagctgacgagcgacagcggacgtatgcacagtctctgcgttttttggagcataagccacgtacgcgccatgaattaagtcagaaacttcgtcagaaggagtttgctgcacctttgattgaagaggcgctggatcggcttgagcgggagaacctggtggatgacgatctatttgcgaaggaatggacaagacagcgtatggagggcaagcggaagggaaaactgtggataaggcaagagctgcgtcaaaagggcattgccaatgatctcattgttgaggcactagaagggataagtacagatgcggaatttgagactgctttgagtgccggacgcaaaaaatggaatcaggtcaaaggggacgtcaaagagaagaaaaataaaacgcttcccttcctaatgagacgtggtttttcaatggatatggtgcgcaaggtcgtgaattgtttaattgaagaagatgaggctggggaccctgaagatgacgaagcgttgttatgggattagcagactagagtctctatactgcattctcttgacaatttctttcgtcaaatactaaaatggacatgagtctgtaagaaatggacaaccctttttccttccaaaaaagcggtttcggtttcttaagatttataccattcttaattatgggttcgctggaaacagtgaatagtacgtggaaacatgtacatgtgaaatgaaaatcggcgggggatcgccgtgagtattcgttattcccaaacatatgtaaggtttgaaaactgcaaattgacccaaggaatgccttggaggaaccaacgaggaggtgaacagtatggaaattgcaatcacgatcgctctcgttgcagccgcgctattcattgggttcggagtaggatattttattcgcaaatctcttgcagaggctaaaatctctagtgcggaacaagctgccgtacaaatcgtggagaacgcgaagaaagaggcagaagcactgaagaaagaaacggtgctggaggcgaaggatgaaatccatcgcattcgcgctgaagctgaaaaagacactcgtgaacgtcggaatgaaattcaacgacaagaaagacgattgttgcaaaaagaagagtcgctggataaaaaattggaatcactcgaacgtaaagaagagcaagtggctaacaaagagaaacgaattgatgagactcagcagcagatcgaaatgatttacaaaaaccaggtgacagagttggaacgtatatccaacctcaccatggaagacgcacgcagtatcatactgtccaacgtagaacaggaagttcgtcatgagacggctcaaatgatcaaggacattgaacaacaagcgaaggaagaagcggacaaaaagtcccgcgagattattacactcgccatccaacgttgtgcggctgaccacgtagcggaaacaacggtatctgttgttaccctgccaaatgaagaaatgaaaggccggattatcggtcgtgaaggacgtaacatccgtgcgcttgaaacccttacagggattgacctcattatcgatgatacgccagaagctgttattctgtcgggctttgacccgattcgccgtgaaatcgcccgtactgccctggagaaactggtggctgatggacgtattcacccggcacggattgaagagatggttgagaaatcccgcaaagaagtggatgagcgcatccgtgaatacggtgagcaagctacctttgaagtgggcgtgcatggtctgcatccggatctgatcaaaattttgggccggttgaagttccgtacaagttacggtcagaacgtcttgaaacattccatggaagtcgcttatctggctggactgatggctggcgaactgggagaagacgtaactctggcaagacgtgcaggtctattgcatgacatcggtaaagcgctggatcacgaagtggaaggatcacacgtcgaaattggcgtggaactggcgaagaaatacaaagaacatccggttgtaatcaacagtatcgcgtcccatcacggagattgcgaagcgacttcggtcattgccatgttggttggcgcagcagatgcgctctccgcagcaagaccaggcgcacgccgcgaaacgctggaaacgtatatcaaacgactggagaagctggaagaaatctcagaatccttcgaaggtgtcgagaaatcgtacgccattcaggccggacgcgaagttcgcgttatggtacagcctgagaagatcgatgatgctgaagcattccgcttagcccgtgacatcacgaagatgattgagaatgaactcgactatccgggtcacatcaaagtcaccgtcatccgggaaacccgtgcggttgaatacgcaaaatagagcattacggaaaagtggccgcagtagtgggccacttttcctgttgatagcctgttaaaaggcaactacacatcatggagcatgagatagagtcctgcaaaggttcaacatttgaagtaagaggactttgcaggaattgaggaggcagtaatcaatgaaagttttgtttattggtgacattgtaggcaacgtgggacgtaaggcattaaaggaaaatttaccgtatctgaaatcgaagtataagccacatgtagtgattgtgaatggtgaaaatgcggcagcaggtcgtggcattaccggtgcaatcgcaaatgagtttttcaactggggtgtacatggtattacacttggtaatcatacttgggacaataaggatatttttgattttatagatgatgagccccgcatgattcgtccagcaaactttccaccaggcacaccaggacgagggtacacggttgtcaaaggcgaagggaaagagctagcgattgtcaatcttcaaggaagaacgttcctgcctgctctggattgtccattccgtgtagctgatgaaattgtagatgagctgcgccaagaccataaatgtattttggtcgatatgcatgctgaagcgacgtcagaaaagattgccatgggatggcatctggatggccgtgcgtctctcgttgtaggtacacatacgcatgtacagagtaatgatgatcggattttgcctggaggaacggcttacttgacggatgcaggcatggtaggtcctcgtgacggtatattgggtatggagcgtgaggccgtgctgcgtaagttctacacccagctacccgtacgttttgttgtggatgatggcaaatggcacttccatggtgtttttgttgaaattgatgaagccacaggtgcggcaacacgcatcgaaaaaattcgtctgacggaggacgagtggcgcatggaataggggtattgtcccaatttgcagggaaacccgtctaaaaagaaggaatttttttgcctcccgcgaataacatctagtaagtggaaacaaactttcaacattcccagggaggtacttaccatggatgtattaaaagtttcagcaaagtccaatcctaattctgtagccggcgctcttgcaggggttcttcgtgaacgtggaaatgctgaactgcaggcaattggagcgggagcactgaaccaagccattaaagcggtagcgatagcccggggatttgtagcaccaagcggagttgacctgatttgtattccagcttttacagacattgtgatcgacggcgaggaccgaacggccattaagctgattgtggagcccagataatacatgcagtatgcattgaacctgtttacgatgtagacaggtttttttgcgtttttttgcaatcacatattgaggagggtttaagatgtccatgtctgattggcgtgtagctgattttcactgtgatgcactgagcaaaattttgatgcagcctgctctttcattccaagatgctccacaactggatgtgaacttgcaacgtttgaaagaggggaatgtagggttgcaggcgttcgcgatctatttacccgaagtacttggcagaggcaagtttgaacatgtgatggggcagttggagatttatcgtagacgtgtggagagaagtcaggagcggcctggcggcacacagacgttgttatggcgtgaacaggtggctcaggtggggcaaacagagggtctgtggggattaatcacactggagggtgtggatggcctggagggcaacctgttctatctggagttatgttatcagatgggcgttcgaattattggactaacgtggaattatgccaattgggcggctgacggagtaatggagaagcgtggagcaggtctgaccgagaaggggaaggaactggtgcgccagtgtaatgaaatcggaatgctgctcgacgtgtcacatctgacggagaaagggttttgggaactggctgacttgagtaaacgtccttttatcgcctcccactccaacagctacagcgtatgtccccatgtgcgtaatctgaaagacgatcagattcaggctatcattgcccgggaagggcggattggactgacgtttgtaccctggtttgtaaagcaggagggtgaggtacgtatagaagatctgctgcctcatattgagcaattctgttctctcggcgggcagcatcacctgatgatggggtctgattttgatgggatatcaacgtatattcagagacttgaacattcaggacattatccgagactgacggaaatcctgctcaagcattatgatgaacatctggttcgtggctggttgtgggggaatgcgatgagttatctgggggaacacttgccagagagcaatccgaagatgcagatgaaggggaattccatgaaatagtgaactggtgtgtgcattgaatgtgttgaattgaaacttgttttccaaataaaggaggggaatgatggtgaaataagtgtatttcatgaattttcaccagttcgttttcatttcactccaaaaaggggtataataccattggattgttaagagcctgagtacaggccatagataaacaaggagtgaatttacaatgagtaaaacagtacctgtgggcgtatctgcccgtcacattcatgtatcccaagagcacgttgaaattttgtttggtaaaggttatgaactgactgaatttaaacctctgtcccagcctggccaatacgctgctaacgaaactgtagcggtaattggttcgaaaggacagtttgataaagtgcgtatccttggacctgttcgtcctgaaacgcaactggagatctccatgacagattcatttgcgattggtgttaaagcacctgtacgtgaatctggaagcattgaaggtacaccaggaatcacaattaaaggtcctgctggcgaagtaacgattgataaaggtgttatcgttgctgctcgtcacattcacttccatacttctgatgctgctaaatggggtatcgaggacaaacaaatgttgaaagttcgtctgggtggagatcgcggtcttgtactggaaaatgtactggctcgtgtatccgattcttttgcactggacatgcatattgatacagatgaagctaacgctgctggcgctcgtaatggcgacactgctgaaatcatcgattaattacatgtaatagcttcagcccccaattatggcggtctgaataacatataaacctgagcacagccaacaggggccggttaattccagccctgatggcaaggctcaggtttttgtgttttctgagtgttcttctgagcatggcatgtttcggattagacgaagggagatgcgctttggatgtggaactacagcccaattcatgctataatttgctgtaatgctcttttaatgttccaagcaagatattcatgtggaacagggatgaatgaacgattttttattaatagaggctgtaaggagtgaccgaaggaaatggctaaagactcaaaaaaggattactcccaatattttgatttctccgatgccaaagtaatttcgcaagatgaattcagcaaaaagataagaatccggggccgtgagattaacatcaaatcggaacccaatcatcgtcaggagaaacagcggggcaaggaagacgtccaggtgctttacgaaaatgccgttcccgatgaactgaaaaacatagggaaaggtaaacactatattgtatatacgtatggatgtcagatgaacgagcatgactcggagaccatcaaaggactccttgagtctatgggatatcaggctacagagaatcgcaaagaagctgatattattctgctcaatacgtgtgccatacgggaaaatgcggaagataaagtatttggtgagctcggtcacctcaaaacgctaaaactcgaacgtccgggattgttacttggcgtatgcggttgtatgtcccaagaagaaggcgtcgtcaaccgaatcatgcagaagcatggctttgtggatatgatctttggtacacataacgtgcatcgactgccacatctaatccaggaagcgttgttcagcaaagaaatggttgttgaggtatggtccaaggaaggcgacattattgagaacctgccgaagaaacgtgagggtatgcgcggctgggtgaatattatgtatggctgcgacaagttctgtacatattgcatcgttccgtttacgcggggcaaagaacgcagccgtcgtcctgaagatgtcattgccgaagttagggatttggcacgacaaggctttaaggagatcacgctgcttggtcaaaatgtgaatgcgtacggcaaggacttcaccgacctgaactacagttttggtgacttgatggatgccattcgccaaattgatattccaagagtacgttttacaaccagtcacccacgtgactttgatgaccacttgattgaagtgctggccaagggcggaaatctggtggagcacattcatcttccggtgcaatctggcagttcagaagtactcaaacgtatgagccgcaagtataaccgggaacactatctgaagctggctgacaaaattaaaaaggccatcccggatgttgtgttaacaacggatattattgttggttttccgggggaaacggaagaacagtttgaagatacactttcccttgtccgtgaagtagggtatgattttgcctatacctttatatattccccacgggaaggtacaccggctgcagtgatggaagacaacgtaccgatggaagtgaagaaggaacgtttgaagcgcttgaacgaaacgatcaacgaatacagccaccgaagcaatgaagagcaacgcggcaaaatcgttgaagtgctcgttgaaggcgagagcaaacggaattccgaagttctggcaggacgtacacgcagcaacaagctggtgcattttgaaggacctaaagatttgatcggtactttcgtacaagtggaaatcaccgatccgatgactttttatattaggggcaacctgctctccgagccggtagctgccaatcagtaatacacacacaaataagatgaatgattttttgcacttagcggggttacgccgagcgtagcaaaggtgacggaatcgattctgtagaagcgaagcgttcgcctttgtctccgaattttaaccttgaataatctcaatcgaaaaaattcggagacaacagcgatcaaaagaacgatccgacaccgcagcggtcactcagcagtcagctgaacttagtgcaacagtgagtattcatcttatatcatctcatagaatggagcgatttcagtggcgcaggaagaagtgcagtacaaccattatggaatgccaacctacgatacgcgcaatctggtcatacgcgacgacattatgggaaaagccaaagaattggctgatatgctcggaacgagtgaggaagttagacagtttcaacaggctgaaaccaaaattcgggatcatgagcgcatccagcagttgattgcaacgatcaagaaaaaacaaaaagagattgttgcttttgaaagcttcaaaaatgtggagatggtcagcaaaattgaacaggaaattgatgatctgcaaagcgaactggacagtattccattggttacggaattccagcagagccagagcgacatcaactacttgcttcaactagtgatctctgtaatccgggatacggtttctgaaaaagtaaacgtggaggctggaacggattcacctccgaccagttgcggttaaatgacggaagggtgcggacgctgtccgcgccttttttgacattacataaccgttaatgtggagtggctatcgccaagtactcggaatataattccaagcaaagctccacgctgtggggttattttgtgtggcgcggctgattttaaatgataaaggcacatgacatcaagagagcttgatacgtacagtgaataaaggagaaatgaataatgagtattttggacaaaatggtggaagacggagacggacgattctggggatttctcggctgtcgttatattaaaggagacggaaaagaagtacagattgcgttgacagcaggcgaacatcataccaactccatggggattattcatgggggtgtattgacttcactgatggaccaggcgatgggtatggttgcaacagcagcaatggaagtagacggctgtgtgacaacaaatctgaacgtacattttcttgcaccaatgaaacaaggggaattaacggtgacagctacggtactgcatcaagcaggacgcagtgttacgactcaatcggaggttcgtgatgcatcgggcacgttgggatgtatggctacggcgacattccgcatagcacgccctagaacgtaacgcacgaatcctgcggttgacaaaagatattattatgtcataatgaaattatcaaaatgaaaatagtcggtggtgcccatgagcgaaaactacgaacacttcaatgcagagagcgacgaacaagcagcacgtgcttatagttcccaaaaatatcgtacccccgatggtgttcctgcggatatcgttatgttcaccttaaccaagcgggagcgcaagacggtgacgaagacacttcccattcgggaactgaaagtgatgctgatcaagcgcaaaggctggccttttgcaggcagatgggcattacccggtggattttgtcaggagaatgaatccatctatggtgcagctaagcgtgagctgatggaagagacaggtgtagatggtggacatctggagtacttgaatgtatacagtcagccgggtcgtgacccgaggggctggattatctctcacgcatttttcgcgcttgtagaagaatggatgctggatcaacgccaagcggcagatgatgctgaggatgttgggttgttcacgattcaggaggcgctgcaagaactggaactggcctttgatcacagaacaatcatcgaagatgcttatcgacgtattcaacagcagatgctggaaacgacgattgctcgtcagttcctgccacgtgattttacattaagtgaattatatcaggttattcaaagtgttgtaccggattttgaagaaccaaacttcattcgcaagattacgtctacccgcagccgtaaaggcattgtggaagaagtaagagatgaagaggggaacctggtgagttccaaccagtactcgcagcgtccggcgcagttatatcgttttacagaactcgtaccacgcctgtccatctacacgtaataaggtgtagatgtgtcaatctgattgaatcaggatcaaccatttctgggctaagggagtgttgacgatgaaagcactgattgtcattgattttacgaaggattttgtgacaggttctttgcctgtaggtcagccagcagtagagatcgaagagacgattgcagctgtaaccgaggcctactgtaagaacaaacatgaggtaatcatggctgtggatctacacgaagaaaatgatccttatcacccggagactgtacttttcccacctcataacatcagaaatacggagggaagacagttatatggtcgtcttgcccgagtgatggaagaacggaaaacagatatacagtggatggataagaccagatatagtgcattctgtgggaccgatctggaactcagactgcgtgcacgtggtattacggatgttgcactgattggggtatgcacggatatttgcatattgcataccgcagtggacgcttacaataaaggttttcatattacggtatacgaagatgccgttgccagcttcaatccggcagggcatgagtgggcacttggacattttcgttccagccttggtgcttcggtggttaaggcgagcgagacagtcttggcttaatttactccatagtcatgtttggttgactccatgttaggaaccggatgaatgtggtgaatggtgtatagagttttttacgggagacttgtttgtttaatacggatgaacagaatcatgaagaatgagtctccatatgttaacccgtgttcacagatgaaatctgggggcacgagcggaagtcagagaggatgagacaaatgcagacaactagcctggctttacatacggataaatatcagatcaatatgatgtacgcccattgggtgaatggtactcacaagcggaaggcggtatttgaagcctatttccgtaagcttccttttggcaacggatatgcggtatttgccggattggaacgtattgtgaactatatcagccagcttcggtttacgatggacgacatcaaatttttatccaaacaagaggaaaattacgatccggtctttctggaagagttgctccagttttcatttcaggggacgattcattccatgaaggagggtgcaattgttttccctgacgaaccgctcattcgggtagaaggctccattatggagactcaattggtggagacggcgatacttaacttcatgaattatcagacgttgattgcaaccaaggcttcgcggatcaaacaggtagcgcagcaggatacgttgctcgaattcggcacccggcgtgcgcaggaagcggatgctgccatctggggcgcacgtgcctcgtatgtagcaggcttcgatgcaacgtctaatatgctggccggagagcgcttcggaatcccaacagcaggtactcatgcccattcctgggtacagagctttatgagcgaacaggaggcgtttgacgtgtatgccaaagtgttgcctgatcaggttacgctgctggttgatacctttgacacattgaacagtggagtacctcacgccatcaagacagccaagaagttggagagccaaggcaaaaagatgaatgccattcgtctcgacagtggtgacctagcgtacttgtcgattcaggcacgtcagatgttggatgaggctggcttggattatgtgaaaattgttgcatccaatgatttggatgaaaatacgattttcaacctaaaggctcaaggagcacggattgatacatggggtgttggtacacagttgattaccgcttctgaccagccatctttgggtggagtgtacaaactggtggagcgtgaagtagacggtgccatgctgcctacgatcaaaatatctgccaatcctgaaaaggtgtccactccaggtaaaaaggaagtgttccggatcattgatccgaaacatggcaaagcgattgcagattatatctgctatccagaggaagagcagccgctacagggcggaccgctcaagctgttcaacccgctacacccttacctgaaaaagacggtcacccgctacgaagcggtgaatatgctggagccaatctttgtgaatggacgtaaagtgtatgaactgcctaatctggatgagattcgggcgtatcaccgggaacagatgaacctcttctggcctgaataccaacggaagctcaacccggagatctaccgtgtgaatatcagccctgcggcatggaatatgaagcagaagctcattgcggaacatgtgaaatccacagaggaatgatctacacataagaaatgcagagaggcataaccagtgagggatactggcttatgcctttttgatgcctataaaatgtatacgttcttagcggagttgaacgattcgatgatcgcaagcaaaatttccgctatacgcgttctgtcttctgtgaaagtacgccgatagtctatagacgttattcttatatgatccttatgggatggaccagtgatgtaagaaatctcatggacaggctgccaaggtaacaggctatactggaaatagtcatgcacaattcaagaagttgtaggggaaaagcagtaattatttctcgggaaagcgcaggagccgccaaattctgcatcgcattgtttcaatcccgtagctgtaggggatgaaagtaagaggaggtgcagacatgagatggatattaggactggtctggatcgcttttattgcctatgcattgttgttggcaccggggcagtcacctggaagtgatccgatattcaaagaacttatcaccctgcaaagcaaagaaccttggttacttacggtattttcgtggttaggtattttcccggcagtttatgcctgtatgctgttaagaacatctgtgaaagaacgaggtggccgtgtaccggcttggccttttgtcatactttcttttggattgggtgcttttgccctgcttccctattatgcatggtcgtcatccgcaaatagagcttcgggttacggaagcttacattttagtcgtcagcgtgagtcgggaattggacgggtagcagcccacaagctgacgcatgtagtccttctgctgttgacgctggggacagctttctatgccgtgacgcaaggtcatccggatgtatatatggaagcattcaagcaatctgcctttgtacatatcatgacgattgattttgtgctgctgaccttactttccatgattgcgatatacagggatactaaactgagtcgacgttcagcagcttggaccgcggcaggcatcatccctattgtgggtccactaatctatctgttgacgctcaggagagacagagcttgatcatccacatctgaagaatccagaagtaaaaggtagccgttaagcctgaatgcgaacaattcatgtgcttaatggaaaaatatatacaatccaaagaaggagtggttatcgatgaaaaatcattttaacgcatatgttgtccgtaaagaagaacagggcggagtgaaagctgctatagagcaactgaagcaggaagatctgccaaatggagatgtaacggtacaggtgcagtattccagtgtcaattataaagacggactcgctacccttgagaaaggtggtgtcgttcgtgagtacccgatggtcccggggattgatctggccggaacggtagaggagtcggtcagtggacgttttgcaccaggagatcgggtgatcagtacaggatttgaacctggcgtatcccattatggaggctatagcgagtatgctcgtctgcgcagtgaatggctggtgcctctgccaccgggtctcagtgagaaagaagccatggcaattggaaccgcaggatttacggctgcactttcggtagatgcgctgttacaggctggagtgacaccggagatgggcaaggttctggttacgggtgcaacgggtggtgttggcagtatggcagtagcgattctggcgaagcttggctttgaagtaacagccagcacaggcaagaaggatcaggaggagtcattgctccgaaacttgggcgcctcagaggttattactcgtgaagaagctgatgctccagctaaaggagcgatggggaaacagctatgggcgggagttgttgatccaacaggaggaccggctcttgcggagcgattgaaacagattcaatacggaggtgcggtagcggtatccgggttaactggaggcacagcttttgaatccacggtacttccgtttattttgcgtggcatccagcttattggtatagactctgtatattgtccgatggaacgtcgggaacgattgtggaaactgctcggcggagaatggaaaccggagcgcgcgctggaactgggaattcgggaaatttccttggatcaattgcctcttacgctggagacgatactccaaggtggtgcagtgggtcgtacggtggtcaatacaatatcagatctgccatccgcataagattctaagtccttagacatgctaattctacctgattgggtcacagcacacgtggctggaaaggaaggattggcatgtggtttgctagaaaagggcgaagtctggttggaaaaacaatgaagtcggtacttgtaagtggtgtgttgatcacgagtgtctggtccctggcggcttgttcggcatcatccattgagcaggagcggaaggtctacacccgtgaagcgacagatgaaggaaatgtgcgggcacagagtcaaggacacggattaaacggtgaattggtgagtgagatcagtaagagttttgaagcaaaaggcattcaactgatgaataatatgtctgccgatgacggtcatggtgggatctcttatatgtatttgttaaatggaagtggcagacacatcgtgaaagtccatattttcagtgatgctgcaacccgggctgccagtatgaaacaaatgtatagtgagaatcgtgatgaggctgtcttggagaatgcgcttggccggacaacgattcgcagcaaaggatacgtctcactcgtttatacagcttctggtggggaaaaggacaagtatgaacaggatgttatgcaggtgttccaacatgtgctggggcaactaaggtaagttgagcgagaaccccttcgtaatttaccatacagctgaaaataaacccgaaaaacccgtctgatctttcagacgggtttatatatttcacgcatcacatgccgcagctcgggcaaaatgagtttttccatggccaatttgacggctcctttggaacccggcatggagaatacggctgtgcgtccaatcgttccagcgacggctctgctcaggatggcagcggaaccgatatcttcggtgtaactgagaaaacggaagatctcaccaaagcccggtagttccttgtccagtagtgaggatactgcttcgtaggttgtatctcggggtgcaatccctgtcccgccgctaagcagcacggcttcaatatcatcacgaacagctgcatcttgcaggatgcttcgaatgttctccgtttcatctggtgtgatgatgtattcaacgatctgataacctgcttcattcagaagctggtgcatgagctggccactggtgtcagtgtctttagtgcgtgtgtccgatactgtaacaatcatgcacgataccgtggttggagcttcctggcgatgttgttccactgaattagtcatgaaacttcctccttcaatcaacatgtcctcatagcatagaccatccggtagaatcaggcaatgtactggggaagagttgaacgttattgcacaacgaatgcgggatggtgtacactcgctagatatagatagatcaggttacaagaaggacaatcagagaggtgtatacgcatgaatgaaacgattttaaaagaacaatccatacctgtatatatactgtcaggttttttggggagtggcaaaacaacactgcttgttcagttgatcgaacattggcaacagcagggtttgcgtcccgcagtagtgatgaatgagttaggcgaagtcaatctggatggtcagattgtggattccactgttccgatgacagagatgttaggtggatgcatctgttgtaccgtacgtggtgacttgggattgcaacttgctgatctcgttcaagaggaatcaccggatgtgattatcattgaagcaaccggtgcggcgaatccaatggagattctggatgcggtaacggagacctcactctacatgcgactggaactgaaaagtctcattaccgttgtggatgcagcacatctgtctggtctgtatcaggagcagaaggggcagacgttcaaactgatgcaggagcagattcgttgtgcgtctgtgcttctcttgaacaaaacggatcgggtgagtgcacaggaactgcaagatctggagcagcttttggcaaaatggaatggcttcgcacctgtaatccctacggtcaaatgtgaggtggagatggatctgttgcttcgcagcggggcagacgtacacgtgcgtgattcagcttctgaagcaggtaagccggctcaccaagagcatcatgtgcatacggaagcttgtggtacacatggctgcaatcatggtcatgaacatacagatcatacagtccaaggcgatgatacgaatactgacgcatcccatagccatgcccacggtcacgagcattccgctcctcatgcatcacacgaacatgtcatggtgtatacgcattatttcagtcatccggtgaacagcgaagcatttgaacaatttgtatctgctttgccacgggatgtatatcgagcaaaaggcatcttatcgtttagtgacacggcgagccgtttctggttccagtatgcctaccgtgaatcggattacatgaagatcacacctcagggagaggtccctaatgttgctgtgtttataggtgaacattttgaccaaactgtcattcgtgaccaattactggaattggaagcgataaagtaggttagatgattcaatattcctccgaactgggtattaagatgcatagcaaactttgcctgggaggtaactttaaatgacacaacaacaatatcaacaatgtatcgatgcttgcctggagtgcatgaatgcatgcaacgtatgttacatatcgagtctgaaagaatatgatctggcgatgttgcgtgattgcattcgtttgaatcgggaatgtgcggagatctgcagttttgctgcacaagcgatgacgcgtggaagtgatttcattgctgaaatatgcgaattgtgtgtgaaagcttgtgaagcttgcgccgctgagtgtggcaaacaccaccatgatcactgccaagcatgtgcagaggcttgccgcagatgtgcagaagcttgccggttgatggcagcagtagcgtaaatattatttcactggaatatataattaaaccgataatgaccgttgtcccctaagggaaggcagtgaacacaagcatctgagacgatgtgcctatgtgttgcctttcagtaggggatttttaatgtaggttgccaagtctgatcgtggtatgtataatgatggcaatgaattgaaacgaagaatatcaatgatcgggagagtagccagatccatacatgacagcgagccggaagaggtggaagccggtatgacatgacctgagtgaaccgcacccgtgagatggttatccgaaaagatgtacgtatcccgattgggataggccatatctgtctgagggtaatccggcttgcgaccgttatacgcatcgagcggaacaggttctactggtatgcatgttgatgcatattaagagtaagctgttcacctagagtggtaccgcgggaactgttaagtcagctctcgtctcttatttagagacgagagctttttttgtgtttattttcagccaataatgaatggataaggagtgtttgacatgttgatgaagcaggctgcggccgatattgcccctttaacgggattgaatgaacaagaggttctgagattactggaagtcccaccacaggcggagatgggtgatgcagcattcccttgttttgcattagcgaagtcattaaagaaagcaccggcagtcattgcaactgagctcgcaacgggattgcaggcatctggaattgaagcgactcccgccgggccgtatgtaaatatccgttttaatcgggagaagctcgcgccgaatctgctgaaagaactggggaatgcggcatttggtaagcttcagcttggtcgaggttcacgtgttgtaattgatatgtcttcccctaacatcgcaaaacccttcggaattggacatttgcgttctactgtaatcggtgcagcactgtatcggctgtataacgaagcgggttatacctccgtaagtgtgaatcacttgggagactggggaacccagtttggcaagcagatcgcagcgtacaaacggtggggcaatgatgaagcgttgcaggcagacccgatccgtacgtccctggaactgtatgtgcgcttccacgatgaggcggagaacgatccttctctggagattgaggcacgcgagtggttccgcaagctggagcaaggggatgatgaagcacagcggttatgggcgttctttgtggaagtgagcatgaaggaattcaaccggatgtatgaacgcctgaatgtacagttcgaccatacgctgggagaaagcttttacaatgacaagatgggcgcagtggttgaagaactgaaggcaaaaggtttacttgaagagagtgatggtgcactcgtggtacgtctggaagatgagaacatgcccccatgcctgattatcaaaaaagatggaacaacaatctatcctactcgggatttggctacggcagtttatcgtcatgaggtgatgaaggcagatcggttgttatacgtggtcggaggcgagcagaagttacatttccgtcaggtatttgcggtcctatcccggatggggcatgaatggtctgcaaagtgtgaacatatcccgtttggcttaatgcgttttgagggaaggaaaatgtccacccgccgcggtaaagtcgtctttttgcaggaagtgttggatgaggcagttgctcgtgctttacagattattcaggagaaaaacccgaatctggagaaccctcagaaggtggctgaggcggtcggtgtaggtgccattgtcttcggtgatctgcgtaataatcggcttaacgacgtggacttctcattggaagatgcggtgagttttgaaggggagaccggaccttatgtgcaatatacccatgcccggattcaaagtgtgcttgccaaggcagaagaggcgatccgcgtggcaaatgaaaacactctgactaacggcacgatttcagatgatgtaaatgacacagggactacttcatccagtatcggagatacctcatgggcattgctgaaactgctcggggaatatcccgagtatcttgaaaaagcaattcatcggaatgagccttcggtcattgccaaatatacaatagatgtcgctcaggcgttcaaccgcttctatcacgctgagcggattgcggatgcgtcatctgatgtaagatccttccgggtggcattggccaaacggactgccgaacgcctcgcgtacagtttacatttgctaggtgtgcaagctccagagcggatgtgatcccaggtgatatggagtacacgtggacttttcaagaaagccaatcaagatgtaccagactcatcaggtcgaggtatgttgcttcaacaagtgagcaagcgattaggtaatgctcaagtacttgatgaaattaatctggaagtgaagcagggcgaatgtgctgtacttgttggcagaaacggctcgggcaaaagcacgttgctacgtatgttggcaggtattttgttacccgatacaggatcgatccagcgcacaatgaagggttctgatgggtatgcagtagatggcctgccacgtttgccctttacctctggagagtatttgtgggacatgggtcggattcggggcattcgccccgaagtactgcgtgggcggattagagaacttagtgaacttttatatctcgataccgcgatagatcagaagttacccctattatccaagggcacattgcaaaaagtgaatttgattcaggccctgttacctggaccgggtggtcttttgttactggatgaacctttatcaggcttggatattccagctcaagaggcagtggtatccttattgggacaatggaaggatgaagggacatccatcgttacagcttgtcatgaaccgttgctaattgaacgtttggcagaccaggtgattgtgttgaagaaaggccgcgtgctccgctattggagtcgtgaagatatacttcaagctggcgaacccgttgtacgtattcaaagtctgatggaagctggagaggatctggctaacgatctatcgattgtacaacaaccgggagtactttctttagttcgtaatacaagcttggagaaatccaatgcttggttgtgggattggaaagtagttcaacaatcaacagatgatgtcctcagaatgattctggcttccggaggttcggttgtgtctgtacaacaggaagaaagtcaattacatatggaaagtctgctggaaggacaacatccagctgtacatgcgagtcgtgaaggtgtcacagaatctgtggacttaagctcttccatggatgatgcggggggagaagtcaaatgatctatctgacccgatatttgttaaggcatcacattcgctcacagaaatattttgcaccggttatcttttatatcatcgccatgctgctgatttattcctacaaacccaaccctattgcggacagttacagtgttacggctatgctgttatttctggcagctgcttggctcggagtaatggtgatgaataccgaacctgctaagcagtatcaattacttgtccttcatacaggaagcaggcgtaaggtggtaacaagtcaactcatctgtgcctggataatgcaattcatgctcaccgtaatcactgtgctgtatcccgtgttcgcgggaatgttcgagaaacaacctacaggtgaggagtggatgatgacttggttaggacatctggggttatcgttgctgggattgggcatcagtgtattttttcaaaaatcgtacattcccttgcttagtcgaagtatgcctgctctcattattgtattattactatcgtttatccaaggttccttaagtgaacgtttgcctgaatcgttagaatggcttggccgcattcttccgccagctttttatctggttcgtgagatgatgttatttgatgaatcaaagatggattcttttgtttcggttatgctgtggactgtgctctatgcattagggttactaatcatccatgtgtggctgtccggaagaagagatctgcggagttagaagacgcgcttcccgataacttgaatgttgctcttggtttggttaggatagagggacatggaatggttaacattgtacggttgaagggggcgctcgcatatgcaaaatacagatatccagaatggtgacatgctggacagcgaacactccagggaattgtttgcctattacggattggcagtgtactacgggcaggcgcttgaacagcagctggtcaatctgattttattaatgaaaatgtctcagggcaaagccgtgtctgaagaggatctggaagatctgtacgaacgaaagatgagcagttcactggggcagctcattcacgaagtgcgccatcattttacattctccgaggaagagactcttcaattgaatgagttatggcagcaacgtaaccgtatcgtacatcactacttcaaggaacgaatccatgagacattcagtccggaaggacgatcacgtatgattaaggaattggaggatttcaaagaccgtgcacaggagttggagatccgtcttcagcaatatacgggtgcctggatcgcagagcttggtctggatgccgaatccgcagcagctctgcagacactggagcgtatgcataccgagagtatgcaagcaagggctttggaagaggatgaatgacaagcaaacagataacgaaacgctggatattaaagacggttctggctgtagtattggttggaatcctgtggactgttgttaccgcaatccgtatatctacatatacggatgaggattcatccaggatatcggatgcagcaatcattctaggcgcagccgtggcgggggataacccttcacctgtatttcgcgaacgtattgaacacgggattgaattataccgtcagggtaccgttcgtaatctgcttttcacaggtggatcaagtggtgatggagaacatacggaagctgaagtgggtcagaagtatgccatcacacatggagtagatcctgcggacattcgcatcgagaccaaatccagaattaccgaggagaatctggtcaattcaattccaattggtgaacaggccggttatcaaacctatacgattgtgagtgatccattacatatgaaacgggccatgaagctggctgtcggactgggtatggatgccgtaccctctccgacacgaacaacggcttaccgaacctggcgcagcaagtttccttttctcgcaagagagaccgtgatgtacatgggatatacgatcaaaggatggatagacaatccgcagcagccatgaggttgcacgcggattgttttttggtctggccgaaataaacagtaacggaacatgcctccagatgaaaatacaaaaaaccgatctacaccgcaaaccctgaggtagctgtgtagatcggtttttgttttgccgtcgagtacatcattttgattgattacttaaagagctatctgttttactctgttatgcattgcctccggcaaaggagattgaggttggaatgatctcacccgacggatttccgttggttgcactcgctgctgcttgcgcaccttgttgaagctgatacatcttataatagcggcctttaagctccatcagttcatcatgtgaaccttgctcaacgatacgcccgcgatgcaaaaccagaatctgatctgccgaacgaatagtggacagacggtgagcaatgatgaaggtggtacgtccttttttgaggacttcgagtgcgttctgaatcaaagcttctgtttccgtatcaatattggctgtcgcttcatccaaaatgaggatggccggatcaaacgccagtgcacgagcaaaggagatcaactgacgctgtccagcagacaatgtacttcctttttcgatgacgggttcgtcaaagccttgaggcaaatgagccaggatacgttcagcgcctacatcacgcagcgcctgttcaattcgttcacgggagatcttctcatcgccgagactgacgttggaagcaatggtgcctgtgaacagatacgggtcctgcaatacaatccccatatgctcgcgaatccactgtttaggcagatctttgacgttctgaccgtcaatcgtgatcttgcctttttgcgggtcatagaaccggaacagcaggttgatgattgagcttttacccgaaccggtatgaccgaccagagcgaccgtctgaccttgggatgctttgaacgtgatgttgttgagcacataatcttttttataggcaaaggatacatcgtcgaagacaacattccctttgtatcttggcatagagccatcggttacggcttctcccttttcatccatcagctcaaagacgcgaccagcagatacgagggaggagtccaggttggcgagctgattcaccataccggtgattggctggaacaagcgacccagaacatcaacgaaggcatacagaacacctaatgagataatacttgtgccatccagcacactggaaccaaagtaccacaggaccaccgcaaaggcgatattccgtaatacgttaaccagattgtgtgaggtgaaggcattcaggttcagcattttgttctggtgtttcatatagtcatcattcagatcttcgaattcctgtttggtttgtttctgatggcggaatacgcggataatggacatcccctgaatggattcgttaatgattgcattgatttcactcagtcgggatcgaatgatcgtgttgtagcgagtagcgaatttgcgatagagcacaatccatgtaatgagcatcggcacaacgaataatgagattagacccaggcgaacatcaagcaggaagagtgcgacatacacacctgtaatcgtgatgattcctgagaaaaagttcgaaagaacagcaacgaacagatccttgacggcttctgtgtcgtttgtgacccgagatacaactttacctgcgggcaggttatcaaaaaagtgcaccggcagtcgctgaatatgggcatacacatcgttacgtagtctttgaatgaccttgttggccgaggattgcagccagaaagttttaccaaactccataatgaccgagatcacgaggaagatcatgtaatacacaattaattgatagatgctgggcatctccggtttgtaaaaagcaaacagttcaccagcggacaggggtgttgccgcatattggcctgttacctcacctgcgcgtgtaaccgtgagggttccatccgtatatgtgcggtccccgtcaggtgcattgaccggttcgtttacaaaataaaaacttctgccggcttgtaatacccgcacttcggaacctttgttttcatccggttcgaacaagccttcgcgtttgtaattcttaccgttgtagactgcggcttcatctgaagctgtcgtctcatagaaaggctgctcaatcgcgagcaagtgattgtcgatcatggatttggcgatgaacggcccggcaagctcggccgcaacaccaatggtaagcataattaatgcagcgataaatgttcctttggctttcaaggcgtaatcaagtagccttttgcctgtattagacttcaatgaattgacctcctacgtggacagattggactcgacctgttgccgttcatactgttcacggtaccagccgttcatggctaacaattcctggtgagtgccttcttccgtaattttcccgtgctccagtacgatgattcggtcagcatgttcaatagcagacaggcgatgagtcgagatcagcgtggttttgcccgagcgtttgttgcgtatattttcaatgattttggcttcagtacgtgcatcgaccgcagataaggcatcatcgaggatcagaatatcaggattagcaataaaggcacgcgccagcgatacccgctgtttctgtccaccggacagagagattcctttttcaccaacgagtgtatccagtccatcggacaaagtccccagatccccgtcaaaagcggcggtacgaatggcttccatgatgacttcatcactggccccaggttgaccaaattgaatgttttgacgaactgatttggagaacagaacttgttcctgtggtacgtacccaatccagctgtgcaagtcatctttggcgatatcctgaatcggatgacccgagatgcttaatgtgcccgaaccggcagggtattcatgaagcagttgtttgagcaaagtagacttaccgctacccgtacgacccacaacacccaatgtttgaccccgtcgtagcgaaaagctgatatgactgagattgtcgacagtggaacttgggtaacggaatgtaacatcctgcatcgcaatttcttccggattcgtaacgtgagcaggttgctccacatcttgtacggcaggttctaccgataaagtctcgttgacccgatcaagcgaagcgctaccacgttgcatcaggttaattaattcaccgatggcaaacatgggccagatcatcatccccaggtacatgttaaacgatacgagatcccccagggtaatttcattatgaaatacaagatatatgccgtaggcaagtgcaatcacataactgagtccaacgaagaggcggatggtgggttcaaatagggcatccattctggcaacagccagatttttacgatacacatcttcggtcacgtcggcgaaccgtttctcgtccagacgttcctgcacataagcacgcacgacacgaatcccggcgatggattccagcacctggtcgttcatatctccgaatgcatcctgtgccagggtgtaacgttgatgtacagctttaccatagatcatcatggcaatggcgataaaaggtaatggcaggattgccgccaaggtcagtttccaactaaccaggaaacccatggcgaacaatacggtggccagaaaggctgtagagtctgttaaggtcagcatgccgaagcctgctgtagtggcaatggaacgaagatcattggtggcccgagccatcagatctcctgttctgtttttctcaaaaaaaggaggagtcatccgtaacaagtggtccataaagcgtgaacgaagcagccgctccaccaggttggcaccaccaaacagtttgtgcatccaaacgtatgtaaccagatagataatgatgaccgttcccagaataagcaaaatataacgcgtaagtgaggtgccggtaatggaaccgcgcacaatctcgtcgatggcattaccaagaagacgaggaggcagcagttcggcaatgcccaccagaataagcaaaatgacaccggttaggtatcgtttgcgttccagccggaagaaccaggccaggtttttaagtacagagaacaagtgttatcccttcctttcgatgtccgagaaatgcaaattccgttcatgaatgccgaaatgtacccacaaaaaaagacataccgcacgcaggcggtatgtcttcatataatcatacggcagcatggctcagagaacagagccgtcaccatatataagttcgattgtgagtatacatcacagaggttctaatgaaagatcgcctgtcatgccgacttatgaacggaataatgatttcgggtgtgctccggtatttagttgtgtgctgaattgacctatcatatgtttgttaaacaccgtaatcaccctttctttttttggaaataaatacaatgtagacctcgtatgtttgcatcttaacaccggcttttacaatctgtcaaacatttttcacaacttattttgtctttatgtggtcactcgggtttgtattcaagtccctgtcgagatatgatggaacatatatatacagaaggagctgacaccaaatgagtaccatacatgtatccgatcaagctgctcgctggtacaaggaagagctgaatttgaacgagggagacagcattcgattttttgcacgttatagctctggcggaggtcttcaccctggattttcgctaggtattgctgtagagaaaccaagacatcctgcggatcaaaccgaagtttcggggattcaattctttatggaagatcacgattattggtatctgaaagggcaccaactgcatgtggacatcgttgatgaaggtcaggatatcgaatatcgttataccgaagtctaagcaatagatggattacaggtcgccaccggcttccgagtaggaggaggggataagcagtgaatctgccaccacgagatttggcccagtatatcgcaaaacgctctcatattgttgtaaaagcagcggtgcgggctgagaacgaacaaggtgaattactgctgattcagcatgctgaacatggtcactggcggttgccagcaggtgagatgcgcccgggtgaggctattgaagatgctgcacatcgggagttatgggaagagacaggttggactgctgataccatgacactggaaggtctctattcggggcctgaccttcgatatctgcattcaagcggagatgaagagtattatgtcattgccctgtttcggacagtgatcattcaggatgaccttgtggagtcgcgtgtaaatagtgatgcaggtctgaagttttttgcgctggagtcgttaccacctcttaatcagattagccgaatcctgttatcgcgggatatcgcagaataaaataagtgttgaccgcaaaaaaatgaccttggcatgcacgatacagtggatgccaaggtcatttttttaaaaatccgattctggtgctcagagcatgaattacacctgatccagtggttcatcatccatcgcaaaatcaaaatcatcaatatcgaatacctgcacaggtgattcagactcaattatgcgtgcaattagttcaacctgatcggtgagaatcgggatactcaggcgctgagatgtcagcagcagttcggtctcaatgggatcgaaatactccccgtactgtgccgtatctattgcattgataatggcaatggatacttggtcaccaaataaaatggaggggcttttggcccatggaacaagtaacgcacgctctatttttttcttattcagcggttcctcgaaataagaaatcatttcattgattttggatttcacatgctgatcatctgccgggttatccatcatgggatcaggactggtctggaattcatatagctcaaggatggtggtataaggaacaatatattcaacaggcgcgggcggcgctagcaattgaccgtaaatggccaccatcacggcttctgtaataaactgacgtgacatggttccttaatcctcctgcgccattaatagttgcaaagtgaatctatattttcatgcaacagcataaccacaatagtacgtgttcaaataggacggttttcagtaccgagaagatgggatgaagctagaaatggagtagcggagcgtagggaaaactacgtgagcaaccgcaatgtttccaaaggaaacatacttcgtaagcctcccgcttatttcggctgaattccatattcgatgctgaggatgcctttaggcatccttcgtaatcaaaagcggactttttgaacaacctctaatatggattattctgttgtagactcgtgtacatgatttgcatgaatagaagtatatcacacaacggtgggaaatacagccaatctgcatagcatgtcaggtcacaaccttcacaacttgaatcaggatttgcccagcagcaatgataaaattcccgccgcaatcaatggacccacaggtacacccttgaacagggcaaccccaagtaccgttccgattaacagcccggcaacgacagttggctgtgtacccatcaacgtagcgccacgtcctccgagatatgccaccagtaatcctacgccaatggcgagcagtgacttccagtgcaggaaagactcaccgatcgtctgcagactcatcttgccactggcaagaggtgccatcacgccaatggtcagaatgataatgcccagtgtaagtccgtatttttcaagccatggaaatgcctgattcaggttcaggactcgtagcaacaacagaaataccatcgctacggtcacaggtgtgttgctgctgataatcccaagagccgcaaatacgagcaacagcagggaagtcatatccattgttttcatttcccttcagtctgtccacgttgtttgctaacgatatgttccgcaatgtaacgtccatgccagcgcccggattcaataaagacttcattggcattacgccccgaagcgatgactccgcccacatatacaccaggtacgctgctttccatcgtttgtgcatcatatagaggtttatccatatcatcagacatctccacacctaccgacgtgagtagttgacgatctggacggaaaccggtcattgccagtacgaagtcattatccagttcccgagtggaaccatccgtgtgtatcagacgaatcgaatcatcgagtatttcattcacgcgtgattccaggtggagtgtgatatgaccttttgtcaccatgctctcgaatagcgggcgtacccatggtttaatatgctgggacagaccactaccgcgataaaccatatcaatatgtgctccgacccgaaccagttccatggccgcatccacggctgagttgcttccgccaataatggcgacacgtgtacgggtataagggtgggcttcccggaagtagtgagttactttatctttatcttctccagggatgcccaaatagttaggatggtcaaaataaccggtagctacaacaacattgcgtccaacatgtacgatggcctccccgcggcgattgagcgtatgtacctcaaacgtaccatcatccttgcgtttaatttcacgggcttcctcatagttatgaacacgcagaccaaaatgttcggctaccctgcgataataggcaagtgcttcataacgaaacggtttatcattaggtgtgctgaacggaacgtttccgatctcaagcagcggggctgtgctgaaaaactgcatatgggttggatacagataaatagattgaacgatattgtatttctcaacgatcacagcggacagtcccagccgctcacattcaatggcagcagacagaccgcatgggcctccgccgataataatgacatcttccatgttcttaatcctccttatttcaagcaatataatcctaccgtaaataacgagccaatgccagttcaagcgtggagtttaattagacaagcttacttgaaaccaaaggagttgacgtgtagagaagaaaagactaatatcaaattagatatatatctaatcgaaagcgagatgaacgatgatgcagctggagaaaattgtggcttatcataaagcgttggctgacccgacccggcttcgcatgctgctgttgttggcacagggtgaactgcacggacaggcacttgccgagcggctgaatctgtcacagccaaccgtgacacatcatgcatccaagctgagagaggcggcgctgattaaggaacgacgggagaaaaatacagtgtatttcacactcaatccttcgtttatccgcaagaatgcacaggcttcggttgattttatctttgatcgagaggaggttacggatatgagtgatgtgaacgaaacattgaaagcgtcggtcatgagaaattttttctccaaagatggacgactgcgtcagattccggctcaatacaagaaaaaactgattgtacttggtcatctggtcgagcagcttgaatttggtcggaagtatacagaaaaagaaatcaatacatttatacagcaataccatgaagactttgccacgattcgtcgggaatttatcatgcatcagttcatgtatcgggaagaggagatctatgaattgaatccgaaggaaatgtggacacgctgggatcaggtcaaatagagtagctggtggtaaaaaaagtttgggcttgacaactgtaaagctaagtgtgtaacataatggataattctacaagggaggcgattgtttatgacaaacttaaatgcagtatacgttaatttgaatatgaacagcgtctccggaacggatcaaagcatgtaattttgcgttagctggatagcagtatccatagtaacgtgaagtatcgcatgctcagatgaagccacgggtgacgcacccgtggcttttttgtttgccgataaagggtgttcctgaattgtttatatcggagggttaagtattctatccggtagatctacaagaagggatgatctttgattcggctaactacttattgccacgggtgtatttctactcgtggttttttgttttgatctgaaccggagatgattgttcactcggcttgaacgaagtaaacaacttattttgggaggaatttttattttagataaccatattgagaagtacggctggtcagcaaagtggcaggaactgtggcaagagacagggatggaagagcaggagaaaaagccagccagaattatcgcagaccatggacatctgcaacgtttgatcacagaagagggcgaatgctggggaagaatttcgggccgaatgcgtcatgatagtctggagaccagcttggcaccagcggttggagattgggtggccattacaggtcaggcaggtgaagaagcaattattcacaatctggtgccccgtcggagcagggtatcaagacaggcggcaggtccagtgaccaaggaacaattaatcgccgcaaacgtagatacactgttaatcgtggctgcacttaatcatgatttcaaccttagacgactcgaaaggtacgtgatgatggcttggaatggtggcgtaaggccagtcattgtcttgagcaaaagtgatctgtgcaacaatgtggaagaacagatccgaagtgtagaagggattgctccaggcgttgaagtgcttgcgatatctgcagtggagggtcaaggtaaatccttactggaacgatatttgcagccagggctgactgttgcgctcacaggatcttctggcagtggcaagtctacgctggtgaactggatgatgggtgaggatgtgcagcttacgcaatccgtccgcgagggagatagtcgtgggagacatacgacaacacaccgggagatgtttgtacttccacagggagccgtattgatcgatactccaggaatgcgcgagcttaatctctgggatgagggcaatgatgggctgtcgcatgcgtttggagaaattgaagaacttgccaccacgtgcagatttctggattgcagtcatacacgggaagctggatgtgcagtgaaagaagccatacaggatggttcattggatgaaaaaagattgaataattatctgaaaatgcagaaggaattgcaatatcagcaacgcaaggaagaagtggcatccagaagacgtaccgcctccagcaaaccggccaatagtcgcaaacccaagcactcccgtagtgtgaaagagtgggaggaagcctgaaatcaggcgggcatcatccggtatcttgcataagataggtcaggagggatgtcattatgccagattacaggattattgtagatctgtctgaccacatgttatatcttctggacggcaatcaggtgattaagggctatcctgtggccaccggcaagatgctcacgcagactccaaacggagagttcactattattaacaaacaatcgaatccaggtgggccatttggcgtgctctggatggggctgtctgctccccattatggcatacacggaaccaatgagccctggtctattggcaaatctgtctcccacggttgtatacgcatgtacaactcggatgtactggatctgtcttccaaggtatctgtaggcacgagagtaacgatccggccgtagggccggattttacttttataagaggtagtttagtggatgaatttggaattatagaaagaagaacatataatatggtaaagctacggcagttacgagagaaagtgagtgatagctatgctgattaggcgggcgcgtgaaggggatgcgcaggggatagctcatgtacatacggagagttggaaaacaacgtatcggggaattgtgcccgacgattttttggatcatttgactacagagtcaagattgtcccagtgggaaaagaatattcgctctggcgaaaaggaacagattctggtggtagctgaacaggatgatgggaacattgtcggatttgcttgtgggggtaaggagcgtgaaggaaaattaccttatgatggagagttgtatgctatatatttgctgaaggaagtacaacaaaaggggataggtcagcaactggcgacacatgtcgttcatcatctacagacccataatatgaaacgtttgatcatatgggctttggagcgtaattcagcttgccgcttctatgaaaagatgggaggcactccagtccagacacagtccctccgcattggtggtcaagatctgatcgaagttggctacggatgggaagacttgagcctctttggagagaagagcctgcccgactgttgaaagacgtccagatggtgagagaatagtgttggttgtattgtttcccttaagcttaaagaatggaagagctaattcaggtcttcacgtttgcgtagttcttaacaaggttaatgatgtattacaccgttgtgcaggtgtgacatttaatcttgatcaggaggcgtattcacatgactttaatggacactgaacatacaacatggacgaaacaatatattaatggcagctgggtagatggctctggtgagaaaacaatggagaatatcaatccttattcgggagaagtaattgccacatggcgctcttccaataagaaagacatagataaggcttatgagtcagctcagaaaaattcgattgaatgggcgaagtctttgcccgctgcgaaagaagaggtattgcgtaaagtttcatccctgatggcggagcgaaaagaggagatcattcaactgttgattacggaatccgggagtacccgaatcaaatcggaggcggagtttgcagcggctaaacgcattgtggacgaagcagcatcttttccttatcgcatgaagggtgagattatcccgtccaatacccctggcaaagagaaccgtgtggttcgtgagccgaagggagtgattggtgttatcgggccatggaacttccctttgcatctatgccttcgatctgtagctccagcgattgctcttggtaatggtgtagtgattaaaccagcatcagacactccaattacggcaggttggcttattgccgatttgtttgaacaggccggtctgcctaagggcgtgctgaatgtcgttgccggaagtggcaacgagatcggggattactttgtcgctcatccggttcccaaagtaatttcatttacgggttccaccgaagttggacaagggatcggtaaactggcgggtgaacatttaaaagaaacggcactggaactgggtggcaacaacgccatggttgtgctggaagatgcggacattgaacgtgctgccgaagcggcggtctttggcaagtttctgcatcagggacagatctgcatggctctgaatcgtatcattgtgcatgccgatatttacgataagttcgtcgattcatttgtagccaaaacgaagaatgtccaggcaggtgatccagcggatgccaaaacactcgtgggtcctctcattcgggaaaaagaggtagaacgattgctggagcttgtgaacaaaaccaaggccgaaggtgcacggttattgctcggagggaccagtaaaggcagtgtgctgtctcctactgtacttgccgatgttaaacctgaacaggatatcgtgcagcaggaattgtttggcccagtagcagtgatcatgaaggctcatgatcagcaggaagctgtacgtttggcgaatgatactccttatggacttagtggttccgtattcacccaagatctgaatcgaggatatcaggtcgcccagcgcattgaatcgggtatggtgcatgtaaatgatcagtctgtgaacgatgaagcgcatgtgatgtttggcggtgaaaaagcttcagggattggacgtttcggtggggattgggccattgagaagtttacacgtacgcgttggatcagcattcagcaccaatatcgggaatatccgggagtgaaataagtcgaaaaagggtgaacaagcaggggcatttatgaatgattagagtaggttataaaaagatcgacaaatcatgcgaaagtccgtatccagcttggttggacgggctttttgcacaatattacacctcggaaaaatacggcttaatataagagtggaaaagctgtttggggctgacgctatctggttatttatggatacacggaagaatcgatccgtaaatccaatggcaaaggggcttaaattcatgtccattgaccgctttattctgaggaaactgaatacctgtcaggaagaacatacacgtgccaatttggttcggctgtttgtcattcgtattcgtaaagccgagattgcggaagaacatgatgccgcctatgtcctgagcaaactacactgagtgatggctgataataattgcgatccactgttaacgtgtatacaactcaaaaaaggaagcttgtctataacgacagcttccttttttcatgtcttgtaatgactgtgtcttacttgactccttttaatataacgataaagcaagggagtcgttttcacttcgactgtggagaatggcttctccattaacaatctcaatactaattaaagaatgcagacatttttgaatggcgcgtttaccgttgctaattttatgctcaagagcactgctaagcaatcttaatgtcttctgcataggttgtttgttttcttgattaaaatatacagggattgatttgttttgaaaggttattagggttctcacttgaaatcacctcacggttgttatttcatacagctaatattaaattccaatgcttaaaattaccttaaaatcagcttatgaaaacataaaggtgggtaatgtttgaaaagtgttcacaattcaattgtgagcgaaggaataaaagtcctgaaaaacgtaacttaattaccatttaaatggaacaaaaaacgatgattttcgtatcctcgcaatatttaattgcataactgccacaaaagttctgagtcgaatgtacgatattttaatatatacgtgggtcatatgtaacaaaattacaggtggtacattgcaaacagggtgtttatgtaagaaaatagggttgatataacgattcattctcttttttttgatttaatctgacattaggacaatttacatatgagaccatgggagggattcggatgattctaaccgtgtattccggccgcgaggaaggagaatggttcgacatcgatgttccggacgaatgtaccattgaacatttgaagacattactcggcgttcgcatttttggacaggcaccgggagacggcattcagtacatccttgaagccaagtttccggaaggtctgtggttctctcctcagaacgcacagcagttaatggaaacagggctgcgacaaggcagttgcgtacgtgtccagcgggctttttcaacaacttcggaagaagcgcctgtatatgggagacgttcattgtttcagcaggacagcaacgaatagggcttttgaacgtatacattcattattgaacgaactaaaggaggtcttctcttcgtgaatgtgttatatcagcgttctccaagaatgacaccggttctcaaggaagagagactcgaaatactcaggcctccaacagaaccgagcaaacccacgttttccatgatatccattattgtgccgatcatgatgaccatggtcagcattggtttctacgtatatatcaatatgaccggcaaaatgaataacagcaattatatgatgtttcagatgatgacggtcatgatgatgcttacttcttacaccattccattcttcgtgtatctgagcaacaagaaatcatatcgcaaaaaattggaagaacgaaaaataatgtatcttgcccaactggacaaacaccgggaagaactgaaagaagctcaggcggagcaagtgaagagcctatacgaaattcatggtgatccgggtgtgtgtcttcaagtggtgaagaaccggaacagttccttgtgggagcgttcaccagaggatgatgatttccttcaggtgcgcattggcacgggagagattccattccgcatcaaacttcaggttccgcggattgatggttacgagaaggatgagctgattgaagcggcccatgaacttgcggctgaattccagacggtaccggatgcttccattacattgcctttgttccaatcgaaggttatgggacttgtcggtgatcgggaggaagtgcttgcttccttgcgagtcatcatctcacaactgacggtacgccattccccggatgaactgaagcttgctgctttctatgaagaaaaggacagcaaggaatgggactggcttcgctggatgccccatatctgggatgaagaccaaggacaacgctatatggccgacaggcacagcggtgcgcatcaattggcggacagcttgttttccgtgttgaatcggcgtcgtaacaataaggaagaccgctacaagaaaagcgtacaaacgccgtgttacgttgtgattctttccgatacgcaattaattgaagaagaaccgttgcttccgttgctgctggaatcggctcatgaaattgatgtatgcaccatcatactggctaatcgcaaagagtctctaccgatgcattgtcagttgattatggatgcctctaaaggcaaaggggtgtatatcaaaaaaacggaagatgcggatgttattcaacaaacgtacaagcctgatgtgatctcgaaagagatggcagaggcgctttcccgttatatgtcaccgatccggttgaagcggtcatctgcttcagatatcccgcaagtgcttccgttattcgatatgctgagtacatcacgcgtggaagatctggatgtggtgtccaggtggggacagacgagatatcctgatacgctgcctgtaccaatgggtgtacgcgctggcggcaaaaaaattgcgataaacctgcatgacaaaattgaacgtcagggtcatggtccccatggtctgattgcaggtacaaccggttcaggtaaaagtgaagtcatccagtccatcgtagcttcactcgctgctgaattccatccacatgatctggccttcatgctgattgactataaaggtggaggtatgtccaatacatttgttgatctgcctcatgtggtagggacaatcaccaatctggatgggaatctgatcgagcgggcgaatatttcacttcgtgccgaactggtcagaaggcaaaaaatattaaatgatgcgggaaacctccagcatattgatgaatattacaagattcttcgttccagacatgaacagccactgccacatctggttattatcattgacgagtttgctcaattgaagcgggaccaaccggagttcatggatgaattgatcagtatcgcggccattggccggacacttggggttcatctaattctggcaacccaaaagccagctggtgttgtggacgataaaatatggagtaattcgcgcttccggatctgccttcgtgtacagagtgagggagatagcagggatatgatcaaaattccaaatgctgcctggattacaaagcctggtcgcggatatttccaggttggtagtgatgaagtgtttgaagaaatgcaattcgcctggagtggtgcaccttataaccagcaggaggattcaacaacggtattgcctgttatggaagtgcgcctgaacggtaagcgggagcctctgttaactggagagcgcagagccgtcctcaaaggtgaagatgttccgaaacagcttcaggtatttattgattatgttgcgcagtctgcagcggatgccggtatccgtcgtttgccaggaccatggttgccacctttaccagagacactggaatgggaaggtcttcaggactggcaggaagaagagaatcgggatctgctgcttgatggcggggcgagtggtctgaaaccactggttggtttgctggatgatctcccgaatcagcgccaacaaccgctcgcattgcctatggatcaaggacatcttgtcgtgtacggcatgccaggactgggcaaaacaacatttgttcagaccttgcttatgtctctggcccgttcccatagaactgagccttggcatggttacattatcgacatgggccgcatgatgaaggactttgcagcactacctcagatcggtggcgtgatgatggctgaagaggaagaccggatcaagcggttattccgctatattctcaagctgtcagcacaacgcaaagatatcatctcggaagcgggggttaaaacgatttcggcgtaccgccggacagctcacgcggctgtcccgcagattgtggtcgttatcgatggttatctttcattccgcaatgcctatccggaagagaatgaacttctggagacgatcctgcgtgaaggcggaagtctgggtatcacctttgtgctcaccgccaatcgggtaacagatgtatttgaaaaattcagaagtaatattcccaatgcggtttcatttgagttatccgatccaagcgattattattatgccgtgggaagaccttccaaggcgccaagccaacttccgccaggaagaggtctggtcaaagggcaagtgcctccgttaatgttccaggcggcattaccttcttccggggcagatgagggcaagcgttcatcagcactgcgccgtacgattgctgagattcgccaaggctggacaggggaagaagcgccgcagattgctccacttccggaagaaatcaaactgaaggatctgctcattcggacaggatcatatggtcaggcttgggatacatcgtctgtaactgtccctgtgggactgcttacggatgatctggaaccattcgagcttaatctgcgtgaaggtccgcatttcatggtaacgagtccgatggaaggcggcaaaacgacatttttattgacatggatgttatcactggcttatcatgcttctccggaagctgtgcaaatatacacagtagatatgcgttatggctcaggtgggctgggggaaatcagcagtttgccccatgtccgtggacatgtatcgcgagaagaacagcttgcgcctgtcattcaacagttgtacgatgaagttctgaaaagaggcgagatttccggtggaccagaacttgtgctcgtcatcgacgatgcggacactttgtccaagcagctaaacgattttaatgtaaaagatcaattgggagcgattgttcgtcaaggaagggatcgcggtgtacacgtgattctatccggagttccggcagacttcccaacctttggttctgactgggtaacggatgtgaaggcttcccagagtggaatgctgttcgggactttagaccctaacgatctctcgttcttccgtataccttattccgaatccggaggtagttcaggtgggctgaaggtactgcctccgggtcaaggttattatgtaaaacgtaaatattccagggttaaaggtgcagttccatgtgatgacagctggaaaatgaccgattggatttctgaaattcgtgaccgatggcatgttgtagtttgaggggaggtggctcataatgttgacggttcatgattctaagcaaaaggtagtcacgttgcaaacaaaggaactttttttcctggctggtattctcggttcagaccgactgcttggtgtggaagatccgtttcgcggctatatggcggaggatatcgcgatggagtgggagcgtgtcaaaacctccctgcttgacaaaggatatctgattcgggatcaggataccgatgagctgatcatgacaccgaccgttttctccagggtagccattgccggattgtccgacagagcttgttggattcgctacacgatcaacggcaagtcgtatgagagttatatccattgcacggatgagcgggtcgttgaagtttcccgtgttgacgacgtaccggactcgttccggctcagcgatctgggaagtgttcgtgaagccattgatgttctgatagagcggatgaaatggagcggccattctcctgcggagaaaccggccctaatgtgctccaagaaaaaattttatgatgtcatgaatgagctcgaaaacagcggagtacagaccgtagcagcggaactcgaacaggagacaagtgatcctgagggctcacttgcactggcacgctgtctggtgggtaaggagtcagacggggagctcaggttgcttgtatggaatgaagacgggtggaagtcgcagtcggcagcatttgctgcaagtgcggtatccaactggttgttccggatgagcactgcggcttcagatgattggcttgttgcagcactaacgactagagaacagtttcacgagatgctgctggactggcttaaacagcctgcaggggaagaggaaaggtgatggtaaatgcgcattcgtgtggaaccggatgtgcttcgggcactgagcaagcagattcagtatgcagcggagcaaatacagcaaaagatgacagtgttggatcaggcgattcattcgctggagtgggaggttgaatcccgcgcagcggtgatgaatgaatggaatcacagtaaacgactgggcgaggatgcgctgcgtcgattaatggacttaagcgtacagctgggacgcaaagcgttgttattccagcaggcagacatggagtatcgttccgtgctgagtcatgtgaacacagcctatggtaatgcggtcaatatgctgaatgttcttcagaacaatcgtacaggagaaatcatgcctgcacattctgcaactgtagctgtagtatccgatcccctttccgcaatggcggccgtatatcgtgtacaggatgccgctccgcctgatggctccccggctacactggtgcaggctatgcagcctgagcctgtagcatggagattcacagatccttcctttcggggaagaagagggaccgagcctgttgtttcctgaacagggtgaataaaagtaacagcagaaagtgaatctttttttgtaaataggctgttaggagaagtttcaagcgctgaaaatggggtaaataggattaggtccttcggcttttgtccgatcgatccgggtatagtacaatttgaacaagtaaaaatttaattgcacaaaccaaggaggaatttacaaatggcaggacgtattttagttaccccagagcagcttgatcaggtttccaaccaatttaaacaaagcggtgagcaaagtcagcaaatcgtatctacattgactcaatccatcacaagcatggaaggacaatgggaaggtatgacaaagcaacgcttcttccaagagttccaagaagctagcaaacaaatgcaatcattcgttcaaacgctgaacagcatcagcgctgaacttacagctattgctaacaaattccgtacagctgaccaagctcgttaatctgctttacatagatcaggccgatgtgaagtctgaattcgtcctgaattataggtggatagcaagctgaagatgtacaactacagcaaaaaccgggcgttgtcacaacacccggtttttgctgcaactatgacactaggacagagagagggataagcatgtcttttcaaccaaatcccggggatgaagtggtgattaacgacattgcctatacgattgggcaacatccggcagcgccgggtctggcttatgcccaagccggaaggcaggggattgtttatcagttgttaccccgtaatggttccattcatggggctaaagcactaaaagtattttttcctaaattccgtattccggctatggtatatcagtctgagcatatggagtcttatagtgaactgccaggtttgcaggtatgcaagcgtgatgtgctcactccggaaagaaacggagcgctcattggaaaacatcccgatctgttatatgcggtgttgatgccatgggtgcaaggtcagacctggttcgatgtgatcagtgatcagagacagttgacggctgaggagagcctgaagctggctagagcgcttgctggaacaggttcggctatggaacaacgtggactggctcattgcgatatgtccgctcccaatgtaatgattccgtttttttccgaagtggagaacctggggaagatgtctgcggtagaacttgtggatgtcgagcagatgtacggttccaagatggatcgtccggatgccctgcttgccgggtcacctggttatgcagcccatcgaacagtgcacagcggtttgtggagttcatatgctgaccgatttgccggagctgttatcattgctgaaatgttaagctggtccgaccctgtgattgtagagaaagcgtggggcgaaagttattttgatcagcatgaaatgcaaacggtgagtgaacggtattatgcgatgcgggagtcccttgagaagcgttggggttccaaactgtccgatctgtttattcgagcttgggaaagtcacgatctgagcagctgtccgacgtttggtgagtggtatgttgcattggctgcggtagacgtggatcaggccaatgcggcggctgcgacatcggaagaaaaagctgccaatccatccgaagctgatgtgaatctgaaaaagagctcagaaccagtaagtgaaccggtgaatacgcaagacgggaaccgtccccaaacgtcgcactctcccgatcaggaagcggttgtgaaccgtctgttcctgcaagcaagagccctggaggatgaagataaaccggctgcagcactggaagtgtaccgctcgctttatcattttattcctcataacagcgcgatgcagatggaagtcgaggctgcaattaaggaactggatgcaaagcttaatccaaaagaagacacagacaaacctgtacctgtgccattctacagatccaaaaagttcatgatatcctccgctgtgcttattgtattgctggcaggtggcgtgccaacggtcaaaatactcgccgatcaggcagaggtgaaacagaaagaacagcaggaagccacacgactggcagatatccaagctgcggaagaggctgaagcagcaaaggcagctgcgctcaaacagcaggaagaacaagagaagcaaaaggcagcagatgctgcaaaactggacgcagaggaaaagaaaaagcttgctgaagccaagcagaaggaagctgaagcaaagaaaaaagaagaagaacgtaaggcgttacaggccaagtacgacaaacaggcgaaatatgaggcctttctggtgaagcaggaacagcagaagaaagaagcggctaagagagcgcagcaggagaagtacgataaacaggcaaaatatgaagcttatctggtctggaaaaaagagaatgatgccaagcttgcaaaacaggaagcggagcgtaaagcggcagctgaagttaaacgtcaacaggagattgctcagaaagcagctctgaagaaaaaacgtgctcagaatgtggtcacgctgattgctcattacaataaaacgtataacgcgcaaaaaggcagaaaaattgaaaatgcggaagcgtatgcccgtgatttcaaaaatctttacaataccgatgcttcctatttcaaaggtgttggcaaagtagccgctcgaatgagtgccattaacaaattcctgagcaacaacagctatacgttgcctaacttataaataacgtgaatgatggaggtgactcaccctagatgaactacacgattcaagcatcacagcgtacacctgcacttattatatatttaattgatattagcgcctccatgaatatggttctggaaaatcgtcgacggattgatgtcgtctatgatgccttatctctcgcgatccgccaaatggtgtttcggtctaccaagggaaatcgtctgacacctcgctatcgtatagccatattggcttacagcgatgatgtatatgacttgttgaacggaatcaaagggattgacgagatcgctgccgttggttctttgcctgacctgacaccgagacggttttcagattctgcgaaggctttcttgcaggcggaaaagattctacaggctgaaattccgaatatgcaggattgtcctgcgccacttgtatgccacatgaccgatggggtagccacaggtgaggatcccgaacctattgcaaaaagaattatgggtatgagtgtacctgacggcaatgtactggtggagaatatttttatatcggatcatttgcttgaaggaccaattgctgaacctagaagatggaagggaatctcttcggaaacgaatctacaggatgagcatggagagaagctgcggaatatgtcatccgtcctgcccgaaagttatcgggaaatgcttgttgaagctgattatttgcttgcacccggtgcactcatgatgctgccaggtacatgtgcagaattggtatcaatcgggttccagatgtccgctgctacgcctgtgagataggaggggaatcatgagagcgatgcgtttggcaacattgtctgctggagataaggggggccatgccgagcaacggcatggcaactttcgctatgtgagtgtacagaccggggaacagccgctaactcgctatcagggtacattcaagtgcagatatggttatggcagagcggctgagacggtccatcagggagataccggacaggactttgctgcggtacgtatgaaagggaatatctgcaattttgttttgtgtgatggcgtaggcatgagttacctgggcgattttgcagcgcgttttctagggaatgctctgttggattggttggaaacgacgcaacacacaacggtagagggtgttgagcgtcttctccatgatcttacccttcccgcatcggagcaattggagaaattacagccactggaaagttcccctttgttgctgcgtgaagtgttgatggaaaagcgaagtcggggcagtcaggccatgtatgtctgtgggcggattgagctcacgggaggcggccgcaaaagtcgggtgtggcttgcgtggcaaggagattcccgtattcgcctgtggcgtaatggtcaggaacagtctgaattatttcagactcactgcaaaataaatgagcgttggtctacacttgaaggaccagttggtggtaagccgcacatctgcgagatgaaagggtccgcaggagattcactgcgtcttcagttatatacggatggactgaacgacctggatgccattcaagcctatgtcccggatgaacacattcaggtactgctggatgcgacacataccggcggtcttgaagatgatgccgctttcattgagctggaatggtgagtgccggatatcaagatgtggatcgatcctcatgaagctgtgacagcggcgaagatcaaatgtgaaaaaacttgctggtgttgatttaaaagacactctttttgggtaatcttgtgaagaattggctttcacgatgagtatgaacgtacattcttacataattgctaaaatgaaggagtgggatggataatgacacaacataacggcaagtcacggttccaaggtaaggttgcgattattaccggagcaggctccgggattgggaaagccactgcggtcaagctggctaaagagggtgcacatgttgcattgtttgatctggtgaatgatcggatctcggaaacggaagcagagattaatgcgctgcaccccggtgcggcaagagcatttgatgtagacatttccgacccggcacgtgtggaaaaggctgtactggaaaccgttgagttattcggcggtttggatattgtttttgccaatgcgggcattaacggtgtatcggcacccattgaggaaattcaggttgaagattggcaacagattattacgaccaacctgaatggtacgtttttcacgattaaatatgcattgcctcacgtgaaaaaacggggtggcggcagtattatcatcacgagttcgattaatggcaatcaacgcttctcaagctttggcatgtcggcatacagcacgtccaaggcaggacaggttgcttttgccaagatggctgcgcttgagctggcgaagttcaagatacgtgtgaacgtgatctgtccaggagcgattgcaacaaatatcgatcaaagtacggtcaaaacggatgatctacagcagatcattattccgatggagttcccggaaggacagcagccgctggcggacgggccgggtcagccggaacatgttgccgatctggtaagtttcctcgcatcttccgaatccagacatattaccggagcagagatcgttattgatggtgccgaatcattgctcagctaagtgagtattctggataaatttcatttttgctaaggcgtgtcttagggtgtgtctgcgatagtcgttcctctggaacggctttttttgttataatgctaacattcgaatagagatactgaagagcagtagggtacattcattaggagcgattatatgcatatagagttaccgatacaagaggttattcctgagttaagacaattatttcgggatcaagatacaggtttgttaattgcagagccaggagcgggaaaaacgactgttgtaccgctggctttgctggaggagccgtgggttgcgggacggaaaatcattatgctggaaccccgaaggctggctgcgcgttcggctgcatcgagactggcggctacgcttggagaaaaagcgggtcagaccgtaggatatcgtgtacgcatggatacccgggtgagtcaggcgacgcgtattgaagttgtgacggaaggggtattgacccggatgttgcagcaggaccagggtcttgaggatacggcgatgattatatttgatgaattccatgagcgtcatttacacggagacttgggcttggctctggcattggaatcgcgagcgatgttacgtccagatctgaaattgctggtgatgtcggcgacccttgatcctgttcccgtctgtgcattgcttggcgaaggtacaaaatcaattcactgtcccgggcgcacgtttccggtggaaacacgatatgtaccgagaccagtagccatgccactggaacaattcacggctcagacggtgaccagggcattagccgaacaggaaggagacgtgcttgtttttcttcctggtgcaagagagatacaccgtacagagcgggagttatcaaatggatctcttcctggacatgtgaaagttcattccctgtatggcagtatgccggtggaacaacaggatgaggccatacggccggcggctgaggggtcgcgcaaagttgtgctgtccacttccattgcggaatccagtcttacactcgctggagttaagattgtggtggatgcgggcctgagccgagcatcggcattttcgccgcgcacgggcatgagccgacttgtcactctgccggtgtccaaggcgtcagccgatcaacggcggggtcgtgcagggcgaattgccccgggggtgtgttaccggctatggagcgaagaggttcacgggggactgcctgaggcagctcgcccggagatcacctccgcggatcttgcgccgctggcgctggagcttgccgtctggggtgtccagtccccagcagagctgcaatggctggacaccccgcctgacgccgcctacggccaggctcaggcgctgctgcgccagctgggcggcctggacgacgcaggccgcatcacgcccttcgggcggcggatgaacacgcttggcgtgcatccgcgactggccagcatgttgctccgcgcagcggagcttgggctggccagctacgccagcatgctggcggcactgctgcaggagcctgccggccttcgcagcagtggcagtgcaggcgcgggcacggaccttcgcccgcgcgtagaggcgctgctgaccgcggacagcagcggcatgccgcaagcggcagcggctgtcgcagacggcgcggccgtgcggcgcatgctccaggagagccgccagctgcgctcggcgctcggcccggcggccgatccggtgcggccggatgaggacagctgcggattgctgctgtccttcgcctatccggaccggatcgggcaacgccgggaggacggccgctatctgctgagcagcggccgcggcgtacggctcgcagcgacagaatcgctgagccgtgcagcgtatctggttgcagccgaggcagacgaccagggagcagatgcgcgcatcctgctggctgcgccgttgcaggagcagaccttgttgcaggcaggtcagcacttgctgcacaatgaagtgcaagtggcttgggattccaatacccgcagcgtgcgggcacataagagacttcgtattggagcccttgtgattaaagagagcagtattgcacagccacctgaagatcatgtgctggaagcactgttaaccggaatacggatggaagggctggattgtctgccctggacaaaaacatccagacaacttgcggacaggctgcggttcctgcatctccatctacctgagtggcctgacctgatcgaagatgatctgaccgaagagttggcagaacatcttaccccttatctgacaggcatgcgatcggcagccgacctgaagagattgtcgatgcaggatgtattactgggtggattgagctggacgcaacgacaacaactggacgatgaagcgccgacgcatatacaggtgcccagtggctcacgtattcctgtggactacagtcgtccagaggacccgacgctggcagtaagattacaggagatgtttggacaacaggagacaccgcgtatagcgggtgggcgagtcccgttgaccatccacttgttatcaccggctcagcgacctgtacaggtcacacgagacttggcgaatttctggcgagagacgtactttgacgtcaaaaaagatctgaaaggtcgttatccgaagcattactggccggataatccacttgaagcggtcgccacaaatcgggccaaactacggggcaaatagatgaattacttcatttttaaagacatcaactatttagctcccaaagggcgcgtatcagggttagactctgctgaacaacagtcagttttgtagctgatcgaatcattctctgtcttaaagaatcaccctttaaccaggacgtgtctccaaactcgctaacgtgcatcttctactatcttttcgctccatgttacgtcactttgccttttcgtcccatgctgcgtcaatttcccttgacgtgccccggcacgcctgccgaaaacttccggcatgggacgagaattcggcaaaatctgcttctttagaggttgaaggcacaccccagagcgtatcttcaaacctgccgaagccaaagcgtaactgcacgtgcctggggagctgaacatggagcagaaccatggagcggagcgctaacgaacttgtgacgtcttattcagcgatttgaagcgcccacagtaacctaaggaatctgaaacacgctatatttgaataaccagccatttaaaacgggtttgtcaggtgattttggtaaataacgtgtctcatgttccttacaaaatataaggagggcccgaaggctaaataagacgtcctcggttccttagaaaattgtctgggacaatccgccaggatcagccagcctagacttcaagatgttttggaccccacgtccttcaacgtagagcatgcctgacaacaacgtatcacatacctgggtttgaaagcacaccctgatgaggagtaaaaaggaatgaacctcagcaattttttactatcaacacatagtatattgacttgcaaacgtttaaaagaaacttaggcgggtaataacatagcgaaccactcaataatatgaggagggattcaatatgcagaagaaaatcgtaggtgtgtttaatacagaacgtgaagcatcacaggctatcgagggtctgaaagcacaaggattcacttcagacgaaatctccgttgttacacaagatcgggatgaactgaaggcaattcgggaagagacaggtacaaaagcccctgagggcgtggctgctggtgcagcaacaggtggtgtacttggtggtgtagccggtctgctcgcaggtatcggtgcactagccatacccggcataggaccgattctggccgcaggccctatcgcagcagcatttaccggtgcagctgtgggtgcaggagctggcggattggtgggtggacttgtgggtcttggtattccggaagaggacgctaaacagtatgaggagtatgtacagaatggtaaaatcctgctgctcgtagattctacggatcgtgactccgatgtgtacgatgtgttcagtggcaacagccagcttaaccgagacagagccgaagcagctcatcgcggagatgtgccagccgaacgtccggatctggatatggaagaacgcagattggaagcccaaaacaaggcagcgcgattcggtaacaatacattcctgtaatcttgccgcgaatttaatcgatatgaaataaacccaaggacttattatctgcaaaatggaatgacatatatgatccaccagatggtcattagccggtttccttaagggaagccggcttttgtccctgtgttgcatataggtgggtgtcaataatgtcggatggtgtttttacccagtcaagcagggaataacaatacatataacagtacagccaaagcgagtccaattaccagtagcatcatggtaagaaaccggattaatccggttgatgcctgaaacgtctgttcattgatttgtgtacgcttccgatgatacgctgctgccgaatacacaatgatggatatgccgccaatcagagaagtgatacccgtaataatcgccgcaatatgtgcaagttgatcatacgccgacgaattgaaaccaaatccggcagcaagaaagcctatgcccgccatggcaatacccgtgcgcacccaggccagaaaagttcgctcgttagccagatgttgctggacatacttggaatcggtagtggttacgtctttgtctgttaaagaaatgtgaatcaactccgttcattaaatatacggcttcattgtactttgtttttatcgcaaaaccaagaaaggatggctgaatgtatgcctcgcaaagaacgaattacagaaatagagagcttaaggggaattgcctttggagcggtggttctccagcattccatcgcacattactcattagtcccggaaacgagactggaggatggcgtgttactggccatactgctgatgctctccaaatttgcagttcctttattcatattcataacaggtatggtgctgttttataacacgggagacaagctgcattacggcaagtttatgagaaaaagagtaaacgacgtgatcgtgccttacctgatctggtcactcatttattttacacttgcaccgcgaggctggaccggatttggatggaatgacatcccagacctaggcctgaagttgcttacgggcaaaacgacttcacacttttggtacatcattatgttgattcagttttatctgttatttccgctctttttgcgagccattcgttatgtatataaccgatatgaggccaaggggcgcttgatcgcattattgatttctggtgtggtgtatcttgtacttgcggatcaattaagaaacatcgccaagttcatggaacaggtgaatatcccggtgctgacagatgcttttacaacgtatgcagaccgtaatttcctctatttctttatttattttgtacttggtgcagcagcagggttatctgtccagcactggaatgaatggattcatcgattgcgctggatgtactggacagtgtttattgttctgggtctgcggtttacttatttattaatgctggagtttcaaaagccggagggaatcaaaattacgttctacacagtcagcttgatccgccctgatatggcactctttctgatcgcttccattatggtcatgtaccagctggccggaaaacttcacaacctcagggctacacgattgctgggatggattggtggtgtatcgtatggcggttatctgatgcatatgttgatgctgcggtatagctacattccggatgagttgttttacgttgctatgggttggaaccctgtcgtccgaatgatcatcacctggttgttggctcttacattatcctgtgtagtgacatggcttatctcgcgtgtaagctggggcaaatggattgtgggaaccgtaccgaagtctgtccgcgataaatgaatccatcaacatatgaaaaattcataatagatcaccacagccacacaggagtgtacaggtgtacgagagtatacgaacacaagatacaggagcacaggtattacagcttttacagcttttgcacagactttcttgtcattaaaattcgatctcacgacaccctgagccctgaaataaacaacttttgaatcaatttcataactcactaaaaatggatttctgtaactggatatagacaaattgaaccgtttcgatcgatatccagccttgattgaagcaactaaaggtattatgaaattgattcttttgaataaaaattaaaatttcattacatgaaaaattcacaaaagcaaacctttttccgtgcttcccccaggtcaacgcgtattcacacgatttcttgctcgccctccttgaagatagataaagggggggcaaagcggagaaagatggcagaacccgaacataagttttataatactagatatataggttctgacaggaggggaatgaacgtggcttttatgattgcacagcgggcatttatcaagctgtatctgattacgatggttgaacagcacagggggtatggttacgagatgctggaggcgatgaagcaggaattcaaagactacggttatgtaccaccccagagcgaggtatatcgggcattacatgaattggtacaacagggtgtattttatcgcacgaagaagctgaagggtaacgatccaaaggtcgattttcaggaaatcgttttatatcatttcacggatgatggtgcggaaaaagctgagttatacaagaaacaggtcaaaacggatctggatcgttgtctcggcatgttacacaaggcagaagaggacaattacggtacgaaaggaagatgagcatgaacagacagttacagtggggtgtactcggtacgtcaaccattgccaaaaatgcagtcattccagcgatccagcagtccgaacgtggtgaggtgttggcaattgccagccgtagcaaggaaaaagcggaaacccttgccgaagaactcggcattgccagatcgtatggcagttatgaagagctcatcgctgatccggacattgaagccgtctatattcctttgcctaaccatatgcacaaagaatggaccatcaaagcagcacaggctggtaaacacgtgttgtgtgagaagcctgctgccttgaatgcagatgaatcggcagaaatgatcgaggtatgtcatcagcaaggtgttctttttgcagaagcaattatgtatcgatatcatcccaagcacagacgtgtgcaagagattatagctagtggagagattggcatcgtcagagccatccatggtaactttacctgtaataccgctgatgacaaggaaaatgttaggttcaaaagagagatgggcggcggatcattattcgatcttggcgtgtatccgatctcggcggcccggatgtatctgggacaggaaccggaagcggtgacagttcacgctctattctcggacgagcatgatggcgtggatatgatggcgtcgggactggtagaatttccgaattcggtagctttaacttttgactgtggcatgtgggcttcaggtcgagcggagatggagattctcgggacggaagggcggattgaactaccaaaagtgtttggctgggagaacagtgatattccacctcagattattgtacacaccgattcggtcagccgtgaggaacgtgtatccgtgtcgaattcctatgtgcttcaggtggagacgtttgcaacggctgtgtttgaaggagaggccttacctttcagtccggaaaataccattcaaaacatgcgcgttattgatgcgtgcctggaatcggctcgaactcgtcaacgtgtgaaattgatcggttagattaggtcaggtcagtttaaacatagtagtaaatgcagactccatcttcagggatgagagtcttttttctgtattaaaatgttaccattataatattttacaaattcaacgtctttatttgatatttctaccaaaatgatgtgatataaatagtcatgagatgacttgtttactataatctagcagaacatacaactagaccgttacagcttgcagaacgcatatcgtgacaacgttcatctactttgagggatcgggaggccggattgatgaaaaagttgatatccaccgcattactggcattgttgttaacgtttgttttcctcacaggttcacagttcactccagtcgcacagcagaaggcatctgctgcaacatgtaccatcatcaatacgtttacaggtgtagcaaattatttgagtgcaaatggaacgttgccatgtaactttattaccaaatcacaggcaacaggacttggctgggtagcgtcaaaaggaaacttggctgtagttgctcctgggaaaagcatcggtggggatacatttggcaatcgggaggggcttctgccttcggccagcggacgtacatggcgcgaagcggatattaactatacttccggcttccgtaattcggatcggattgtgtactccaatgatggactcatctacaaaacgacagatcactatgcatcatttacacgtttgaaatagaggaaggagcagccatgaataccgtgattctggatggagaagactttgcgagtagcactgaacttcatcaacaattaaaggttaagctgaagctgccggatttttatggcggtaatcttgatgcattgtgggattgcctgacgggtacgattgaacttccactagagttaagatggaccaactaccgaatcagcgaagaacgactggggaatgaagcaggccgggtacgtgatttgatgttggaggtacaggctgaacagtctagatttcaattgcgagttgagaagtaggcagaaaataaaggcagttcaaatacaatatgtccagccgagcagaccacttgtggtctgtttttttgtgttatagaaggttgttcaaaaggttgtcccaaaagtccctgtgttgattacgaattctctgaaagaatagcgagctataactttgcttacatgccgttaaaattattttcacggaggtattgatttctgcataacttacgttaaaataaaattaacatgaaaaatattttaacgttgaggagtgaaaagggatgagcgataacacagtagttggcaagcaaggtatgggtgagttaatacgaatcagaccgtacatgcaatttatgcttagtaaagttgtatccagatttggtgattcgattgactcgattgcctacagttggatggtgtacattctaaccggttcaaaagtgctgatgggtacgttgctggcggtgaattttttgcccaatatccttctgggtctgttcgccggggctttggttgatcgcatgtctcccaaaaaagtgattgtgattacgaataccggtcgcggtttgttggtgggtattacagctctgctgtttggattgggccaacttgaagtctggcatctgtttgtcattacaattctgaattctttgctggaatgcttcactagtcctgcagaagtgtccagtgtcccccgattgcttcccccatcaatgctgctttcgggtaatgccatgtcctcttccgcaaccagagtggccgaactcgcaggacttgcagtggcgggtgcccttattgctacaataggcattgcctggacgatcctgattgatgcggggttgtttgcgctaagtgctttaattatgagccgagtcggctatcctgaaaccttaacatctgctaacaatgatgataggacattaactgaaatagattctcttccatccgaaaaaagtagtatattctccgaaatggcagaagcttttcattttctccgtaaacatgccttactgttaattgtctccatcctgtttgctttcgttaatttctgcctgatgccgtttaatgttcttcgtacaccctatgtcattgaaacgttgcatgctggcgctgggggattaagtctgcttagtgggctgatggtgggaggtatgttgcttagcggtgtatggttgacacaaaggggagcgaattatcgtaaaagtgtgctggtcatcagcggtattgtcatgttgggtctcagttatgcgatgacggcactacccgcttatatgacttccttccaactgccggttgcagcggccttttgtctactgatgggtatggggattccgctggctacaacaccgctggccacctatcttatggaagttaccccttcggagatgctgggtagagtgtatgcccttcaaagtatgctcgtcttgagtgttgcaccccttgggagtctggcttcgggagcacttgcagattggatgaccatgcctgttctgtttatcgtctttggtattatgcttgccatgtcagcaggtatgctgttatttagcaaaagttttcgaagtgctctgtgaagatattcagatgtgatcattagccaattttctgtatcaagtcatttctcgctcgttttgaccgaagtcctgacgcaacgttataatagagatatcgatgaacaacaggtaccccggaaatgaggatacagggatggcgcacaaggttctttcaacaattgaagaaattaaaatctactccgatccgtatcggatacagatcatgaatatgtttaacaagcagggcagaccatccactgtcaaagagatcgccgaccagatgggtgaggtgccagccaaagttcactatcatgtaaaaaagctggagaaaattggtctgttgaccatcgtttccacgcgtgagattaatgggattatcgccaaatattatgaaccattcaccggagagatccatctccgtcacgaagatgaagacaaggaaaactctccattgaaacaggtgtttcggtccgagacgctcaaattattaaatgaaatgttcgaacagagtcgtcagcgattcatgcatcaggcggaaaacgaagatcggatgtttctctcggacatcacgctgtatgcaacccgtgaggaagtagagcagctgtataaaaacatcataaaactctgtgaaccctatactacaaaagagaatcgacaaggggaacatgaggtctttcagttattctctgctctctctaaacctatagtgaaaatacctgcttctaagacagatgcaaaagagaaaaagaaagctacgtccagtaagggtaaagcaactccgaaaacgtctcgatctgtgtctaagcggcaggaatctgcatcatctggtagtgagtcggaagaataaatggatggaatacatgggtttagcgttatcgcaggaagcaagtaacggcaaatgtgagagactgctatggagaaaactagaaaaagccgcccattggcggctttttaatgcgtgataaggaaggctaatggtggagcggtctatggaatcaatcaattttgacgcttaacgtttcggttcataacaaagttacatgttctcatcgtagcccttcacatcacgtttagctgcggttgcgggggagttggatgtaccatattcttcgaccgcttcccaggcatctgcgttgtcgaacttgccggcccgctgctgtcttccttctccagcaccactcggaggcatggtcattacctcttcttcaacgggccgatcgttgctgatctcccgattaggcgtgtcgtcaatacagtaagcggtataagggatagcctcaagtcgttcgaagggaatatcttctccgcacgttacacaggttccatatgtaccttgctccatacgttccaatgcgtcgttcacttgattgaattcgtctgttaatgtatcgtcaatcgccagatcacggctacgttcaaatgtttccgtaccggcatctgccggatgattatcataggaggacagctcaccggttgaatctttcagcgactcgactggagcaccgtcttccatgctggattcaaaatgacgctgtaagttttcacgttgctccaaaagggcgtttttcagtatttgatgttgatctttagttaatgtactcataaggacatgctcctttcccgttgtggggtgtagtgagtctttacccgaattggatgaaaagcaatcattttcgtgaggaatagggctgtatcgttttatatctgacggattatgtgttataaaaaatagagagagaaattgccgtgtgttcttcccaggaaatagaactacggcttggcttataatggaggttgtcaatatggatgaacatatgaaacgaagattggataaacaaagacaattgttcaaacaattgggtgtgcagctagatgcgttatcgatacatgaaaaacaatttaattataaacttcgtggttatgatccggatgaggtagatgcttatcttgacctagtcatcaaagattacgaacgtttctatgccaatattgcagatctaatggacaaatggcaagaacagcagttaacgatccgcgatctcaagtcgtccgcgaaaccggtggaagatccaaccaagattgatcgcaaacaactggatgatattgtgaaacaactggaatacagtgtgcgacagctcaagatcagagcacgtcccgaaaaggatctgttctctgaataaggtcggcatgtcctggattatattaaataaaggtggttaatcatgagtactcatttttcggtcagtgtgcattgtttgttgttattgtcactcagcgcgcctgaacgaatcacgtctgcacacattgcaggtagcgtgaataccaaccctgtcgtcgtcagacgtattctgggcgggctgaaaaaggtgggattggtgaactcctctcctggaacaagaggcttctacttagcgaagccatcaagtgaaatcacattagccatgatctatcaggctgccaaggacgaaggtccattgttcccgattcacggcaattgtaacccggattgtgaagtgggcttgcatatagacagcttgctgaccaatctgtatcaggttgccgaggcgaaggtggagcagttctttgcatccattacactcgaagatatggaacgttcctgtactcagatgcaagctgttccatcacagacagaatagattgcaataagacgaaggaaaggtgggttgttatatgaaaattgtagtcatctctgacacgcatttatcacgtaaatcacggaagttaccgactaggctcctggatgtattgccgagtgcagatctcattcttcatgccggtgactggtcggattggagtgtatacccattgcttagtgagtatgcaccagttgaaggggtagcgggtaatacggacccgtccgaaatcgctgaaaaactgggatattcccgtattgttgaagtggaaggacttcgtctgggtcttgtgcacggacatctgggatcaaaaggtacggagcagaatgcaatccatacctttgcaggccagcatgtggatgctgtgatctacggacactcacacatcccggtgatgcataccgtggacaacacactggtatttaatccggggtcgcctacggatcgacgttttcagaaacaatactcatttggcatcatgacaatagatcaggggaaaatacaggctgaacatgtgttctttgatcgggattagagagataagcgctggttgcaagttggacgagtacaagaaccagaaccagctactgaagtggcgacttgataactgatagggaaccttctccttaaatttcatcttatatatatgattattgtacaaggcatctttgagcagaattcaaatctgttccagagatgtcttttttgatttctgatcacatcattctcttgagaagttatctctgaatggggaatgtgctctgttcgttatctgtcattcatctgttggcgttttcccctatggtgacgttcagtggagtgatacaatgcctttacgacatgaaatgaatacgtttacataaggagatggatcatgatgaaactgtctgtattcacggtggctacccctgatctgaatgcagaagaattggcatcggctgcggcagcagcggggattgatggaattgagtggagattccgtggaattcctgaagatgctatatctgaagagccttcttactggagaaataatcgatgctcggtagatccgagccgctgggaggaacaggttcctgtttttcgtgaagcagcgttagggcaaggtagaaaatccatcgcacttgtaccgtatctgaactgtgaagatctgtctgccaccaagcaagcgtttcaggctgcggctggtttaggagcatctatgatgcgtgtgggtgttcctggatatgatcgcaagaccagttatcctgagttgtatcgtaaggccgttgattacctgagtgaagtacaagatctggccaaacagtacaacatcaaggcgattgtagagacgcatcatcagacgatagcaccgacggcatcgctggcctatcggcttgtgcaatcgctcgacccgcagcatgtgggtgtattgtacgatccaggcaatatggtgcatgaaggatatgagaatcatcggatgggacttgagttgctggggccttatctggctcatgtacatgtaaaaaatgccgggtggtttgaaccaaaaggaaaagattcgcaaaaggctaatgtgactgagaagagcagcggattggctctgaatacagcctggaaatgtcactggacaccgctgactgaaggcatggtcgattgggtacagatggtgcgagatcttcgtgccgttgggtatgacggatactacggaattgaggactttagtggtgccttggaatccaaggcgatgttacagcattttgcagacgttttcgccgaaattgagcgtcgtgtggacgaggaggagcagtcatgagtatcgtacgagtagcggtgattggcattggaaacatgggggcagcacatgccagaacgttggtggctggagaagtacccggtgcagagctggtcgccgtatgtgatgtaagaagagagatggagagctgggtatccagtcatcttccggcaacggtcacctattggcaggatgctgagcagatgatggcttcgggtacgattgatgcagtcattattgcaacgccgcattatgatcatccggaacaggccattcaggctttccagcatggcttgcatgtcatgatcgagaagccggccggtgtatatacgaaacaggtacgcaagatgaatgaagcggccgcagccagcggtaaagtcttttccatgatgtacaaccagaggaccaatccactctacattaaactgagagacttgattgcttcgggggagctgggcgaggtacggcgtaccaattggattattacgaactggtaccgatcccaaagttactatgattccggcggctggcgggcaacttgggcaggagaaggtggcggtgtactgattaaccaggacccgcatcaactggatctgtggcagtggaccatcggcatgatgccggtgcgaatgcgtgctttctgttcgtttggcaaatatcggaatattgaagtggaagatgatgtaaccgcttatgtggagtatgaaaatggagcaacaggtgtcttcgtaacgactactggcgaagcaccaggtacgaaccgatttgaggtcaacggagaccgaggtaaaatcgtgatcgaagacggaaaacttacgttctggcgacttcgggaatctgagcctgaattcaatcagcggtttaccggaggttttggacagccagaatgctggaaatgtgagattccgattacaggtgtggaaacgggtcacccgggtctgattcgcaattgggttgatgcgattcgtataggtgcaccactcattgctcccggtgaagatggtatacacggattaacattgtcgaacgctatgctgctgtccacctggacggataactgggtagatctgccgatcgatgaggatctgttctatgagcatttgcaagaacgcattgctggatcaacgacgaagaaagacaaggcattcagtggcagtcaacctgctgatttgagtcagacgtttaaatgaagacaatttcttatatagacgagttcattgtaatcaacattttataataaggatgggatgacatggctaaagacgggatgttctatgcaccgaaaagtgttacaaaagaggtcgtatgtggtccgggtgagttcacgattgctgctgttgcactagatcatggacacatctacggcatggttggggcattgttggaagctggagctaccctcaagtgggtatatgatccggacccggcgaaggtagcggcatttcggaagcagttcccacaggctcaagccgctggatctgaagcagaggtgcttgcagatgatgaggtgttattggtggcaagtgcagcgatcacttcagatcgtgcaccgcttggcatgagagttctggccgcaggcaaggattattttacagacaaagcaccgtttaccacactggagcaattaaagcttgcacgagaagaagtgaagcgaacaggcaaaaagtacatggtgtattacagtgaacgactgcatgtagaaagtgcgatctatgcggggcaactcattgaacaaggggcaatcggcaaagtagtgcaagttatgggtacaggcccgcatcgcctgaatgctggaggaagacccgactggttcttcaagcatgagcagtatggcggtattctctgtgatatcgggagtcaccagatcgaacaattcctgacgtttgcatcatgtacggacgctgaggtagggttcagtcgtgtgcataacttcaatcacccacagttcccggaactggaagacttcggcgaagcttctctgatcggggacaacggagcgtccggttacttccgagtggattggttcacacccgatggtctgggcacatggggcgatgggcgtacagttattctgggaacggacggttatattgagctgcggaagtatatcgacatcgcaagggaacctcagggggatcaggtgtacctggtgaatcatgaaggggagtaccgttacaatgtaaaaggcaaggtcggctacccgttcttcggtcagctcatccgcgattgcctggaccggaccgagacagccatgacacaagaacatgcattcaaagcggcagaactctgtctgattgcacagcacaaagccatgagcgagcgcgtggtgtggagtagcggggcgaagtaaatgttttaggtgaaggagagcaaaggttgattactaaaggttatccttaattcttctattgttgagtgaagaaagagcagcccaaatgttaaactggatccaaatggttagtcttttctaacaaatggagcagttcgcactgggctgctttttttgagtatgttcgtgacttcgcagatggattaatatgggttatattatatgtagttcggatattgtttgaaaagagaagtatttacgaagttcgtatatatgatgttagctgaaatttctgaaagaggtgcgacatgaaatttaatttatttgataatggtataaattctcttatatctggaattgaattttatgataagtatttaaattcaaatgatttatttaatcagagtggatatggtgatttgaaactggcagttatttgcatacacaactctgttgagatacttatgaaatacttactgagtaaacaaaatgaattattgatttataatgatctcgctagcagagacttattggaagtaataaaatttaacaatgagaaaaactataaggcacctttgcatcatatggttaactcaagggatatatcagttcaaacaataacatacaatgaagcgattaatcggcttaaggtctttattgaaattagagaaaatgacgtgatgtccctgaaattaattaatacattaagaaataaaatcactcattttgggatatatagagaaattgacttttatgaagtaattgggattgttaataatacagttgaatttattacaaacacgttatatccgattttcagtgaagatgaatgtgaattttataatattcaaaatgtatttactaaagttgctgaaatagtatattttgggagatatcaggaacatgaatattggtctgcgttttatagttttgaatttgagtatctaggcgatattgtcaagaactttatcaacgatactgaaataaaaaactatcttgaccagagggatcttagcattactacagaaggtggtattggctatagtgactttatatctcttgcggtttttggcaatgaagactacgaggacttttttatgaagttagaatctattaattatcctggattaaatatcacattaattaaagatgacaatgatatgataatagcttgtattgatcattactataatttaaccaatgaagataacaaaaaaatattagaatcgaataaaccattcagcattacagaagaagaacctatttttgattcttctaagaaacaaaaaaagtttaacgataagaaatatgattataagtcagtaaaatctatattattgagaagaattgatgaagcatactcgagaagcagaaacctcagctaacaaggtatctacgctgcgtcgctaacgttccttgatctgcccgaggcattttcggagaagaggaatcaggcagacaaccctgcaaggctaagtggcgacgcgacccagtcgctgtgctccttaagccttccggactcatagatacaacaacgttagctgaaatcaatgtaagtcaaaaagagaggtcatttttgtggcatatacacatgaagaatggaacaaaagagtgaaaagtagatcggatctaagtggatatttatatcacttaactaaagcagaagtagacaagaacgggaaaatcacattaaacgcaatagatagattaatgaaaataattaacgagagaagattgataggaagttctacagaaagcggatttattacaggggatcgtaaagctgtttgttttcaagatactccgattggttcattaatggagaatacagtgcatgaaaaagattatagggataaacttggtggtaaaattaggtatgtaagtatcgggttagcttttccgaagccatatatttttcaaaatggaggaagacctgtattttacgaatcgaaagaagtagcaaaacaaatcttgcctaaaacagaatggtggagaattgtagattataatttaatgcataaaaattatttgattgattggacacatgagagagaatggcgtttaccattagatgagtttatttttgaactctcaaaagtaacaataatcctaccgaatcaacaaatgtttttagattttatggataaaatctcacaagaagatttaaagcaaatccaaggtatagtacaaacaagtattgtgattttttgaatgttttattcaataatcttaatgcagactgacttcagctaacataatattcgcgttgcggacattcgtccttagtctggcattcgctagacacccgacatgagtcgggtcgtgaatacagaaacgttatatgacaaaatcaaatgaagagagagctgcttggctctcaattagaagttatatttaattcattatgtaattgaagagcatccttaaaaccttgcaagtagatttcacgttctaggattgtttgaactgagaggtctgcatcatcgtaaagaaatagagttttatgcatatccttaggtagaagttcatgtaactgtttgaagtaaagatttcgatcagatgagaattgattatagctggtgttgttcttgagaagatcgctatacaaggtttcaattcgattacgaatcaacgaatcaagtaagacttctaaagaattgtgcataaatgatcaccatccgttatttttatattacgaataaaagtttaacttattgaacattattttatcataacgaaaattatagtcaagacatatcaaagttttttttgattactgaaatatactttcatataattaaagaaaaattcaattaggatacgaaggagtaccagatgataagttacaaaccatttcaaaaattattgattgacagggagattaagaaacaagatttattgaaaatgacggggatttcatcggcaacgatggcaaaactcaacacgaatgaatatgtctcgttagaagtaattgataaattatgtacggcattgggttgccagcctggagatcttttggaacatgtaacagaccaatgaaagaatacaagaggattctggtttactcaaagatgtgattccatcgtataacataatatttaagtaactgctccaaacggagccttggtaagtgggaaggattctgttgaggcatttcagcagacaacccctttgaggttcatgaatacagaaacgttagctgaaattagaactgttataaaacctactaacgtctagaaaggatagacatgtataagttaataactttattgattttggtagttctgatgggctgttcggataatatgcgtgagagctccgaacaagctaacctaataaatgataattccttaaaagatgagctaaatgcgatatatacctataaattaattactgaagaagatcaaacattagggttttcgaaatttcttgatactggcattttcgaaggtgaagaaagtgctaagtttagaggctcgctgcttactttgtttggtgatccgttatataagtcagataatgcagaagatgcataccattatttattagaagtaagcaaggatgcgagtaagtggtgttttatggtttatgaaggtccttcaggaccttcgattggttatgatagcaatgaaaatcaaccaaacgcaatagaagcctcaaaagctttgctagagaaaatcagagaaacgacaccttctgattttaatgaagtcatctattacgaagactttgactcgaaaattacatatgggtgtaagaacagagaatgcttttataaagaagaaaacgaagaaagtcattagaatctgagggtgtttcatagaagacattaacttcagctaacattatattcacgctgaggacattcttccttggtccggcattcgccggacacccgacatgtgtcgggtcgtgaatacaggaacgttagacgaaaccgatagaagcataaatagaaaaaagatatgataggagacattatggaaattaaacttgttccagtaaaaccagaagaaaagagtactctatcgaatctgtatcaactgtatcattatgattttagcgaatttacaaaccaagagattaataaagatggaaggtatgaagtgaacattgatttcttttgggaaggtgaccatagatggaagccatatttaatagaggtttctggaagattagcaggattcttaattgtgcttcttgagaatttagataccgatccagatccgacacatgtgatctatgattttatgattattaagaaattcagaagaaatggtattggttactccgctgctatcaaggcatttgaattatatgaagcgaattggaaaattgctcagatggagaataatactcctgcaatatcgttctggagaaaagtaataaaagattttacagaagataattatattgaaagattcagggatgatgtaaagaagtatgttcaagcgtttagtacaaagcaatagaaagatagcattttgtagggttattcaaggcggcatcgtctaacaatgctttcctactgtgggcattcgcccttgatcgccaagagggatttcagcgaagtatattcaggcgatacattcaaccagctaagtctgacgacccgttcccttcggtcacttaagctgcttgaacgtcaggaatgcggaaacgttataggaaatcagcgagtaaatcgaaaaaaagtcgctaaaatgcgtatacaagaaaggagaagatcgaattgttgttcgctcaattggctgaaaaaaatcagttacattttaaatctggttcaattaacgggacttcaggagttgctgttttcaatacatcgtgtactagtcgatattttttagagaaacgttgggaacaaggtgaagacattctgactgcaataatgatgaatccaagtagggcttcacacaatgaaactgatgatacggttgatcagttaattagtgttgcaaaaatgcagaattgtcatgcactatttgttgttaatgtttctagtcatattcaaggtaccagtagtaaaacaaaagtttcacactttgattatgaagccattaattggttgtttgtttctaatgctattatagaagctaaaatcgttttccttggatgggggatgaaggggcagaaaggaattaataaacaacaaaaattatatcctgctatagtaaatacttttaagacttcgatagataaattgtatagttatgaagtattaaaatcggaagataagaaattcattgaaaatcctattttttatgtacctcatccacggcctcaggggcagaaagataaatattcaaatatatcaattcaaaatattagtagtgatgaattcaactgcttatttgttagataaataagatatctttaaattaaataggatctaatgcttgtaagtagttcaaagagggcgttgacatcctataacataatattcaagctgcggctccttttggagtcttggtctgcaagttggatttcggagaagcatttcagcagacaaccccttcggggttcatgaataccggaacgttaagtgaaattccagtgagaactataggcttgagaaatggtatgatataaccatcaaaacagaggagggacaatgatgaaatggcaagaagttcaacagatttttccgaatcaattcgtaaaattcgaagttcttcattctgaagaaacagacaatcaagagatcattgatgatgtggccgtgattggcccgatcagtgatgaagaggcaactcgcgaattattgaacagcagagacaagactctggtttaccatacttccaaagatcaaatcgttgttaaggtacggaaaaatataggattaaggagaaatctttaaatgaatattgaatatagagatgggctgttattcacggaaataacagtccattttaataagcagaagaaagtgatatcgaacatcgtgatcgatacaggagctagtcatagcttgctttcacaagatgaagtggatgagattgggatactagtgagtatggacgatgaaatcatcaccagctacggaatcggaggtaaagagcatgccttcagtaagcgaatcgacggtatacaggtaggggatttcattttaaaggatatatacatagactttacttcatttaaatatcacaacattaacggacttttgggactcgatgtactgacggaaggagaatttgatattgatttaaagagacttaaattacttcgttcacaatagataaaagacattagagattgagtggtgattcgaggaagactggaacatcacttaacagcatattcaagcagcgactcctttcggagtcttggtctgctagatggatttcgaggaggtatttcagcagtcaaccccttcggggttcgtgaatacagtaacgttatccgaaatacctgaaatggggaattgacaatgaagtacttgaatacaagaagaaaaaggtttatgtttgcatgtttgctcatcgtagtaatttatttttatctttctggatggataagcatggaagtgaaaaaaacagttagaagtgtattgctaactgaagattttataaagaatgaaaaaaatataaagaaagaagcatttgataactttttgagatttagcggtagggaagtttatccgttatataacaaaaatgatgttgagatagatgttgttgtaagtcaacctatttcaattcattattttgttgggggatatgcatggatgacttatagatatagaggaattgacaagaagactaatgaaatactatttggtgcaaatgctccaataagaataaaagtagatctggttaagggtcgatggaaaatcattaagaaatgggaaaaaccgtgaatgagagtaattcaatgaagtcaggtacatcggataacaatacattcctactgtgggcattcgcccttgatcgcttagaaggattttcaagaagattattcaggcgatacattcaaccagctaagtctgacgacccgttccctgcggtcacttaagctgcttgaacgtcaggaatgccaaacgttatctgacataaaactattacattttaggagcaaataatgaatatcactttttcgaaatgggtgcaatattatcgaagaaataatcagaatctcaaatatattcattgggatgacaactataaattaacaactaatgaaagagaaataataattaagtcaattcaacagtttcaattaggagaaaactctgaaggtaaacatttaattaaacgtgcacaagaatatgtacatcagacacaagaacaggattactatgaagcgcttatagaattcattaaagaagaacagaggcacgctagagatctaggcagatttatgaaggtacagggaatcccgcttcttcgtagacattgggtggacaatgtatttagaagattacgtcaatatgcgagtctagaacaatcagtcattgttctattaaccgctgagatcattgctaagttgtactataaagccttgcaaaaatctacaaattcagaagtattaatagatttatgtaatcagattttaagtgacgaggagaaacatgttcagtttcaatccgaaacacttcataaatttgctcgaaatagaaacgttctctttaacagaatagtttatatccttcgtagaatcctttttgaaggaacgctaattatagtgtggtatcaacataagcctgtatttaaagctgggggatataaactcaaaagttattactatgaatgccgtcatgagtttaacttaacaaagaagattatagctaattcacagtagaggttcacgtcatataacattatatccatactttaggtcctgacgctccctcggttagcccgaagggaattggcagggaagtggaatctggcgaacacatccgtaccgactaaccgcagaacggcgtctcttgacggagccttaattcggtgggacgtcgtgagtacagaacgttataggtgatcagcgtaaaaacagtataacaattcattattttttttgaataggagagaaaccatgctggaggcagtcattttcgatatggatggaacactatttcaaacaaacaaaatcttagaagtatcgttagaagaaacattttctatcttaaggtctctaaatgaatggtcgagtgaagcaccaacccaaaaatatcgtgaaataatgggagttcctctaccagtagtttgggaaacgttattgccgaatcattcaaatgaaatcagacgaattgtggatgagatcttccttgagaagttaattggaaatattaataatggcaatggcgccctatatccgcatgtcaaagaaatttttaattacttgaaagatgaaggctatttcatttttattgcaagtaatggactaaacgaataccttaatgccatcgttaactgctacaaattagataagtgggtggcagaaacttatagcatccaacaaataggaactcaaaataaggatgacttagtcggtcatattcttaaaaaacatcacatcagcaatgcaactgtagttggggacaggatttctgatttcaatgccgcaaaaaacaatgggttgaaggctattggttgtcgatttgattttgcccaagaaggggagcttgcacaagcggattttattattgacgacttacttgaattaaaaaatatatttaaacatcagggaaaatagaatgcttttgtaattatatcgaagaagacgctgaaatcctataacaccatatttaagctgcggttaccccttggtcacaatgatgtttttggcaggggagttgattcatgtgacaacttgctgcgcaagttcgtgaatacagaacgttatacgcaaccccttaagaatgctaaatcatgcaaccaattaataacagataataaatataggtgaaagaatacattcacaacgtagcagttgaaaaccaggatgaacggaatattagaaggtgtaccatataacaataaatttccacatcgttagttatgctccttggtcatcaagaataccagagaagcggattcataataaagtgcaaactaaagaatatttctattatgcgaaagagaggatcaaatgaattatcattttggtttttcatggaagggtctgataatctttttattgccaatgataccaaatatattttattttttaatccctgcgtcagatatatcaggaaacaatgcaaatagccatttgattttagatgttttggagcacggaagtcaggcgatatttttctttcttctgatatttgttgtaagaaaacaagcatctgaagtgcgatgtccttatataattggtatggcaataatgttgattttttattatgggctatggatattgtattttacaggcaacgcaaactcgattatttttttggggatggctgttctcccggtagtatattttatattagctgagatttggcttcaaaattatctggctattataccaacagtactttttggtattgtgcatgtcattaatacatatttgtctattgcgaattaaagggaagacaacaattctcttaaattttgattgtgcgttcagcatgtattctatatcaaggattaagtcccgaatggtgaggttagaagtaagccacagcttaaggcaggggtgtccaacgtgagcaggaatctgaatgaagccatcggcaaatctccggtccgaggaacacgagcctcttataaggctagctttcattggatgaagttactacacaaaccaaagttgatactgctgaaggcgtacgagagtaaatgagggggatctttcctatgcggaaacggatttgataggagcaaaagatagaaccaaaagataaaacacgtaaagacataataaatacataaaacacacaagacatataaggatgtggaatcgaagaagaaggggcagcgtataacaatgcatttttgcttcgtcgctgacgctcctcggtcttcaagagggatttcggagaagtggaatcaggcgacacatccaaccggctaagtggcaaagccacccgaacctccggtccttaagccgtttggacgtcagaaatgcgcaacgttatacgcaataccctaaaattaagaagaaactaaagaacaataaaagaagaaacataataaaacttaattgaaggtgataattatgaaagaatgggactacagtaagccttggtttcatggctcgccattatttctaaatgaattactagtcggaagcacaataactcaagatcgagagttagcaagaatcttttcgcagaaaccatctattgtttcttttgatgagaatggcgcaagatttcataatggtaagttatgtggatacatttacataattgatgaggaaattataagtgaggatgtatatccacatccagcaactaccatgaaacctggtgaagaatggctcttaaaaagaggattaaaagtacgaaagatagatgagacaaaaacaagagcggaagaacaactttcagagcaagaggagttagaattattggaaaagctaaacaacagatagcccatagcttggtcacagaagagggtgctgcaaataacaatgtattcacgcctcaggccattcggccctgggtcaggcaggggaattggggcagccggacaaccctgcactggctaagtccgtcagacccggctgtagcccttaagccagtgagggtttgtgaatacaagaacgttatctgtaagattgaaaaatgattaaaactgtaaaaagaaaaagtatatattatctaattatagagtcaattcaattgcaacgttctgttgctagaggggaagtgatcaaggtgctaattttgatcctgcttataattattgttatgggagtagcaattatagatgggagattaaaaaagaaacttgaaaatgataaaagaattattgaaagattagatgtgttaattaatgaagtgagagatatccgtaaaaaatagagaaataataatcaccaaagaatagacaacctcgttggggttcatgaatacaggaacgttagatgaaatccccaatcaataaagactaatacttttgagtgcatttcatttttaagggggaaacataaatgatagaacttaggaaaataacatttgataatttttcagaatgtctggacttaagagttgaggaagagcaaggcagatttgtagcatctattatatatactcttgcggaattgtatgttgttataacaaataaaagcagttttattccaatgccatatgcgatttattgtaatgataagatggttggatttatcgcaatgtcatatgttatttctgagagtgaagattctgaaaattattatgacatatatagatttatgatagataaacgatatcagcgcaaaggatatggcaaaaaagcaatagaaaagtcaattgagttacttcgaactttgccgcatggagtggcctcagaagtcgtgattctttattcgcccgagaataaggcagcaaggaaactttattcttctcttggttttgtagaaacaggggagttagatgaagacggcgatattttggcaaaactgatcttataaagcaagcaggatttctatgtagtaattcgaaaaaataaggtgaatcatctaatatcatattaacgcatctggtatttgccctaggtcgctgggagggatatcgagggagatgggtcaggcgacaatcctgcactgactaagtccgtcggacccgtgctgtcgcgcttaagccagtgagtgttcgtgaatacaagaacgttataggaaatcaagagaaagcctaaataaattataaagattagataaatcattagttaaggacggtgatttcaatgagtagcttgttactaacctcttgtggtttttatactgaagatattaaaaatcaatttctggattttattgatggagatatttctcaattaaaagtctcaattattacaacagcatcccctagaaaagaaactaatagatatgcacaaagagcaatgcaagagtttaaggacatgggatttcagcatatcaattttgtagatattgaatttgatgacccgcaaattctcttacatagagatgttatatatattaatggtggaaatccatttacactattgtattacgctaagaaaagtggtgctgatgaaattatcagaacactggccgcacagaatgtaattatagttggagtaagtgcaggaacgttattactggggccgaatattaacattgtcgatttctttactccacagatgaacacaatggatttaacggattttaaggcattaggtgtaaccgacaagcttatttttcctcactatgatcgagaggacatatttaaagatagtactaataaaacaattgaagagagaatagtagaatttgaatgcaatgagaactgtaaggtgacaaggcttaaagatgaagaatatatctcaatcttaatgaaccaagcacattgaaagtgataaattcattgaaagtagctcgaagaagcccctaaaatcttgccaacaccgtattcacactgagggctaagccccttggtctgtcagtggggtttcgaggaagtagtatccagtagacaactcctgtgaggctaagtcttcgacccagtcgctccattaagtctctcgggttcgtgaatacaacaacggtagataaaataacgaagaagtttatattgggagttgattcattgaagtattcaactgtagttcttgacttggacggaacattattaaattcaaaaaaagaagtatctaagagaaacgtagatgcggtcttatcttgttatcagaaaggaatgagaataatatttgcaacagctcgaccgcccagggcggttaattggttgcttccacaaggattagtagatatcggggcttttgtatattacaacggagctcaagtgatatgtaaggaaaccaagatagaaattaatgaatccatccctactaatgtaactacagaaattcttgattactgtttgaagtatgaccctcaaattgagctgactatggaagtgaaggatgagtggtttagtttaagagagcttgattatattagctcaatgaacacacaatcaaaccccatagtaaaacccttaaaagaattaaagcaatatgatgctacgaagatacttctgactggcaataatcacaattctggattgtttgaaaaattcgagggtagagtgaatatactaattacggataataataagttagtacaaatcatgcctcttctggcatctaaggaaatggcaattactaaactctgtgaattatataatgtagaattggattccgttattgtatttggtgatgatcataatgatgtaggcctctttaagatggcgggatattctattgctatgggaaatgcgattagggaattgaaggaaatcgctgatgaaataaccgttaataatgatgaaaacggtgttgctgtaagtctagaaagattttgtgggtaactcaaggttactttatctaacagtacattcatacaccgtcgcacttgctcctcggtcgccaagaaggatatcggagaagttgattaaggcgacacattcaatcagctaagtctattaactcgttccctacggtaagctgcttgaacgtcaggaatacaacaacgttagctgaaagaagttcttattttaggaggagtctatatgatattagaaaaagttataaataaaattaccatacaaagtgaatataaggatttggttgataagtatgtggatcatattcttaacgaattcaaagataagattcatagcatttatatgtgtggctcgattccaaaaggaacagctaaaccttttaagtccgatgcagactttactattgtatgtgcaaatcccgaagatattgattacgaaagattgtcaatgattaaagagaggcttttggaagaatatccattcgtcactaagatggatacgatcatttgctcgattgatgatgtattaagtagaccgaatgattggggtttttggattaagatcatttgtgtttgcatacatggggaggacattggtgaaaaagtacccccgatcaacatttctccagaattcattttagacttaaatacagataccaaggaggaagtagatcgtgtacatcgttcactttctaatgttagtgatcactcaatgaaaactagatatattaaaggttactctaagagattaattcgtgcattatactctttggttttagaagatacaggggtatgggaagatgaaatcaataagatgaagaatgccatattaaactattgtgagattgactccgctttagttgagtatctttatgcttgttacttggatagcgatgtatctgttgaagagtttctggaaatcgcagatgaagtatatagctattttgagaacgccttaaataaaatggctgcttccagaaattcatttggctaacaatatattgaagagttttagaatgtaattcaatgatgccggcaacagcggataacattgttttcacccatcgtactcctatactgtccttcggtcaccagaaggtaaggaaccaggaagcggtgtcaggcgatcaaccctgcactggcaaagtggcggagccactcggcctacctaccttaagccattgaggcgtcgtgaatgcacgaacgttatgcgaaaggccgaagaacgtataaaccatgaaaatttaaaggatgaaagaaatgagtaagaagacatatcttgtgaatatagcttatctaattgacttaactgacgaagaatataaagaaatcgatggggatttgactcctgtactagaaaatgaaattacaataaggagagatttgaaattacattgggagagcagttcctctgtatatctcgatccagaagcaatgaattgcggaagatgcgcaaaatgtaattcatgggcaactgacagagaaaagccaaatcatattgatgaactcaataacggagctgttgttgaagggcaattactttgtgatgagtgtttgccagaggagcatagatgggccttctaaaaatggataatggttagtaattcgcagaagtctgatccatctcactcttcgagtcattcggagctcggtccggccaaagtaagatgagaattcggagaagtatttggtagctgcagggaagtggaatcagccgtacacatccgcaccgactaagcgtatcacgcccagcgacttcgtctcttaaagtcggtgggacgtcgtgaatacaagaacattagcaaaaacctctgttaagaactgtgttaaagaacagaaccaaatacaaaaattttcagacttgcgtcatcgtaattcaaagacagtttatacagaggagtggggattcatgattaaaaaatcggaggaatttttaaagatgatgttaaatttcttcccttccactagtactgattataaaaaatcaattgagaatcacggtatggtattagaaactgtcataattgagggaatattcatgccggagattattaagttattaagcgagaatagaaataacaagcttctagaaagtatttttgattattttgaagaagtatctaattgcaaagatgattacttaattaatagcattttttcagttacagtattggaaatattgggtaacgacgaaaagatccttcgggctgcacaagagtatatgggacctaaaaccatgcaacttcaattagaggctgatagaggattaggtaggattagatagaagctgatcaacgtggtgggacatcgtgaatatagaaacgttgtccaatactcccaatcaaaacaacaaccataggagcaatattatgacaatcattttcaaagaaataaaagacattgatacacacgcaattcaagaactgtttcactcggtggactggaaatcaggagatttcccagaagatcttagacaagcaataaacaactcgcatacggttattactgcatgggatggtaccaaattagttggcttaataaatgcattgtctgacggagtgatgacagtatattttcattacatgttagtacacaaagaatatcaatcattaggaattggtaagagaatgatggaacaaatgcttagtcgatattctaatatcaaaacaaaagtgcttatatcctatgttagtgcagaaaaattctatgaaatatttggatttaagccagaagaaggaactaaagccatgtttatttcagatatggtatagcattgaagtaaagattccgatcagatgagaattgattatagatggatttttttttgagaaggtcctatataaagcttcaattcagaaatgaagggataccagatgataagttataaaccatttcaaaaattattgattgacagggagattaagaagcaggatttattgaaaacgacggggatttcatcggcaacgatggcaaaacttaatacgaatgagtatgtatcgttagaagtaatcgataaattatgtacggcattgggatgtcagcctggaaatctattggagcatatagcagataaatgatgggattagaacatcggctggttactcaaagatgagattctgtcgtataacattatattcaagcagcggctcctaaaggaggcttggtctgctggatggatttcgaagttgatattatggtagacgcctccgagtttgttgaactacataaaaacaggaaggtgattagaaatcactgcaataaattaaagaggagaatctaattatgtctcgacctttgaaaattcatattataggttcaactggtagtggaaaaacatatcttggtcaagttttatcagagaagttaaatataaaattttacgaactagatacagtcatgtggagcagtaaagtggagttttcaggaaagaaccctccagacgtgagagataaattactacataaaataattgataatgatagttggattgtagagggagtatattataaatggctttctgatagcttttcaagagcagatgtaatttattacctagatactaatgtgttgattcgacattttagaattatcatgagatttgttaaacaagggataggcgttgaaagatctatatacaagcaaacattaagaggactaattgaaatgcttgtttggaatcataaatttaatagtacaaatcggaaagagatctgtagtttcttgtccccttataaagacaaagtgataatcttaaaaactaacaggaaaatgattagtttgctcaatgaaggcagtataatcatatagctccccgtgtgaaatcggcgaaactacttaacgagggtgaacaatgaagataataagagatagagaagaacttgaaggaactggttatattgaagttttacccgggaagtaccttgggcaatgttggaatgagaactcaatttactttgatgaagaagtattcggctatatagagaaatcaatagaaaatatattttctggatatgatcattatgcatttaacgaaatacatcggaaaacgtgggaggtgatccttgaggatttgaaaacgtttgctaatctccttgatgaaaaagtaacaattgaattaataaatgaacatgtgtatttcttctttggcagttctaaagttgagtttcaacaaaattttctcaatagtgttcagagacttcgtgaattaatcatagagtttgttgtatggattaaaaagcaattaacaactcaagattatgtttcagttctagggatttagctattccattcgaggaagagtggttatttaaagcagcataggaggaattagaatgaagtttatcgtttctgctagtgtaatcgttctcaatgaacataatgagattttactcatgaaaggtcgaagaggttgggaaatgcctcaaggttgtgttgaagaaggagagactattaggcaggcagcagttcgagaagtgaaagaggaaacagggattgacatcgaattaattaaattttgtggtttgtatcagaacataacgcgaggcgtatgcaacaatatatttactggaaaaccgattggaggtgctttaactaccagtgatgaaagtgaagaggtgggctactttactttagaagaagctcaacagatgataacatgggggaatttctataacagaattcataatgcattagatgagaaaagtcatccttttttgattgaattttcagaataaggacatccatcagatcctagttttctaatccaaatacagatatgagagtagtttaatataaggagcagcccgagaacaaaggttgcttctttttttgcttttacacttcgcaaatggaacattgtgggttatattggatatgatttggttctatagtagagagatggagaggtgatcaaccttggatgaaaatgtacgctttccgataggacactttgagccaagtcttaaattctctaatgaggaccgaatccatatcattcgtcaaattcccggaattacgaagaccttaagagagattacacaatatctcaatgatgaacaactttgtactccttatcgtaatggtggttggacgatcacacagattgtgcaccaccttgcggacaatgacatgaacgcttatatcagatttaagagagccttgactgaagatgaaccgatggcaagctcatatcgagaagatttatgggcatcattacatgattacaggaatacgcccatcgaagattcaattttgctgatggagatactgcacaagcgatttctcactctgttgtatggtttacatcccgatcagtttagacgaaaactccgaacagaagtgttaggtacaatttcattggatattgctctacaaagatttgtatggcacgggcagcatcatattgctcaaattaaatcttgtataacatcgcagaggtggtgggtcttatacatctcaagtgtggagtttaacaatggggaattgtgagttgaatttctgaggagccttggtctgttgctatcatttaccggggatatgtatgtaaacggattcagaacaggattagtgactgcacttgaaatataaagtcaattataagaaaactagattaggggatacggatattgattgaagatgaaaaagtataccctgattgcgcagttgaaattagaatagtagacgttggcggtttaacaaagccagagcttattcagaaactggaccaacactctattttattgaataaatatggagaacagttgttaaatgatgagagatttgtagtttccggtacaaagcaaagcttccaaacggttgagttgaccgtcagacaacttggattttcgaatggtgctacgacatttcagctctttcgaagagcaaatgatcttgggttggaatgttgtccggttgagttaggtccttatctaagaatgcaatatttggatcagcctgagatatgttctaccaatatttcagagggtaagaaagctccgtacggctccattaccatagcatctgcagcccttacggaggataatgattttccaaaaggtttttatctcagac

(The sequence listing continues in the following parts.)